(19) United States
(12) Patent Application Publication
(10) Pub. No.: US 2007/0265189 A1
(43) Pub. Date: Nov. 15, 2007

(54) INSULIN AND IGF-1 RECEPTOR AGONISTS AND ANTAGONISTS

(75) Inventors: Renuka Pillutla, Bridgewater, NJ (US); Renee Brissette, Edison, NJ (US); Arthur J. Blume, Annandale, NJ (US); Lauge Schaffer, Copenhagen (DK); Jakob Brandt, Broenshoej (DK); Neil I. Goldstein, Maplewood, NJ (US); Jane Spetzler, Copenhagen (DK); Soren Ostergaard, Broenshoej (DK); Per Hertz Hansen, Lyngby (DK)

Correspondence Address: NOVO NORDISK, INC.;PATENT DEPARTMENT, 100 COLLEGE ROAD WEST, PRINCETON, NJ, 08540, US

(73) Assignees: Novo Nordisk A/S, Bagsvaerd (DK); Antyra Inc., Edison, NJ (US)

(21) Appl. No.: 11/775,642

(22) Filed: Jul. 10, 2007

Related U.S. Application Data
(63) Continuation of application No. 10/253,471, filed on Sep. 24, 2002, now abandoned.
Application No. 10/253,471 is a continuation-in-part of application No. 09/962,756, filed on Sep. 24, 2001, now Pat. No. 6,875,741.
Application No. 09/962,756 is a continuation-in-part of application No. 09/538,038, filed on Mar. 29, 2000, now abandoned.
Application No. 09/538,038 is a continuation-in-part of application No. 09/146,127, filed on Sep. 2, 1998, now abandoned.

(51) Int. Cl. A61K 38/00; A61P 3/10; C12N 5/00

(52) U.S. Cl. 514/2; 435/375

(57) ABSTRACT

Peptide sequences capable of binding to insulin and/or insulin-like growth factor receptors with either agonist or antagonist activity and identified from various peptide libraries are disclosed. This invention also identifies at least two different binding sites, which are present on insulin and insulin-like growth factor receptors, and which selectively bind the peptides of this invention. As agonists, certain of the peptides of this invention may be useful for development as therapeutics to supplement or replace endogenous peptide hormones. The antagonists may also be developed as therapeutics.

[0001] This application is a continuation of U.S. application Ser. No. 10/253,471, filed Sep. 24, 2002, which is a continuation-in-part of U.S. application Ser. No. 09/962,756, filed Sep. 24, 2001, which is a continuation-in-part of U.S. application Ser. No. 09/538,038 filed Mar. 29, 2000, which is a continuation-in-part of U.S. application Ser. No. 09/146,127, filed Sep. 2, 1998, both of which are incorporated by reference in their entirety.

### FIELD OF THE INVENTION

[0002] This invention relates to the field of hormone receptor activation or inhibition. More specifically, this invention relates to the identification of molecular structures, especially peptides, which are capable of acting at either the insulin or insulin-like growth factor receptors as agonists or antagonists. Also related to this invention is the field of molecular modeling whereby useful molecular models are derived from known structures.

### BACKGROUND OF THE INVENTION

[0003] Insulin is a potent metabolic and growth promoting hormone that acts on cells to stimulate glucose, protein, and lipid metabolism, as well as RNA and DNA synthesis. A well-known effect of insulin is the regulation of glucose levels in the body. This effect occurs predominantly in liver, fat, and muscle tissue. In the liver, insulin stimulates glucose incorporation into glycogen and inhibits the production of glucose. In muscle and fat tissue, insulin stimulates glucose uptake, storage, and metabolism. Defects in glucose utilization are very common in the population, giving rise to diabetes.

[0004] Insulin initiates signal transduction in target cells by binding to a specific cell-surface receptor, the insulin receptor (IR). The binding leads to conformational changes in the extracellular domain of IR, which are transmitted across the cell membrane and result in activation of the receptor's tyrosine kinase activity. This, in turn, leads to autophosphorylation of tyrosine kinase of IR, and the binding of soluble effector molecules that contain SH2 domains such as phophoinositol-3-kinase, Ras GTPase-activating protein, and phospholipase Cγ to IR (Lee and Pilch, 1994, Am. J. Physiol. 266:C319-C334).

[0005] Insulin-like growth factor 1 (IGF-1) is a small, single-chain protein (MW=7,500 Da) that is involved in many aspects of tissue growth and repair. Recently, IGF-1 has been implicated in various forms cancer including prostate, breast, colorectal, and ovarian cancers. It is similar in size, sequence, and structure to insulin, but has 100-1,000-fold lower affinity for IR (Mynarcik et al., 1997, J. Biol. Chem. 272:18650-18655).

[0006] Clinically, recombinant human IGF-1 has been investigated for the treatment of several diseases, including type I diabetes (Carroll et al., 1997, Diabetes 46:1453-1458; Crowne et al., 1998, Metabolism 47:31-38), amyotropic lateral sclerosis (Lai et al., 1997, Neurology 49:1621-1630), and diabetic motor neuropathy (Apfel and Kessler, 1996, CIBA Found. Symp. 196:98-108). Other potential therapeutic applications of IGF-1, such as osteoporosis (Canalis, 1997, Bone 21:215-216), immune modulation (Clark, 1997, Endocr. Rev. 18:157-179) and nephrotic syndrome (Feld and Hirshberg, 1996, Pediatr. Nephrol. 10:355-358), are also under investigation.

[0007] A number of studies have analyzed the role of endogenous IGF-1 in various disease states. Interestingly, several reports have shown that IGF-1 promotes the growth of normal and cancerous prostate cells both in vitro and in vivo (Angelloz-Nicoud and Binoux, 1995, Endocrinol. 136:5485-5492; Figueroa et al., 1995, J. Clin. Endocrinol. Metab. 80:3476-3482; Torring et al., 1997, J. Urol. 158:222-227). Additionally, elevated serum IGF-1 levels correlate with increased risks of prostate cancer, and may be an earlier predictor of cancer than is prostate-specific antigen (PSA) (Chan et al., 1998, Science 279:563-566). Recent studies have indicated a connection between IGF-1 levels and other cancers such as breast, colorectal, and ovarian. Serum IGF-1 levels are regulated by the presence of IGF binding proteins (IGFBP) which bind to IGF-1 and prevent its interaction with the IGF-1 receptor (IGF-1R; reviewed in Conover, 1996, Endocr. J. 43S:S43-S48 and Rajaram et al., 1997, Endocr. Rev. 18:801-831). Interestingly, PSA has been shown to be a protease that cleaves IGFBP-3, resulting in an increase of free IGF-1 in serum (Cohen et al., 1992, J. Clin. Endocrinol. Metab. 75:1046-1053; Cohen et al., 1994, J. Endocrinol. 142:407-415; Lilja, 1995, J. Clin. Lab. Invest. Suppl. 220:47-56). Clearly, regulation of IGF-1R activity can play an important role in several disease states, indicating that there are potential clinical applications for both IGF-1 agonists and antagonists.

[0008] IGF-1R and IR are related members of the tyrosine-kinase receptor superfamily of growth factor receptors. Both types of receptors are composed of two α and two β subunits which form a disulfide-linked heterotetramer (β-α-α-β). These receptors have an extracellular ligand binding domain, a single transmembrane domain, and a cytoplasmic domain displaying the tyrosine kinase activity. The extracellular domain is composed of the entire α subunits and a portion of the N-terminus of the β subunits, while the intracellular portion of the β subunits contains the tyrosine kinase domain. Another family member is insulin-related receptor (IRR), for which no natural ligand is known.

[0009] While similar in structure, IGF-1R and IR serve different physiological functions. IR is primarily involved in metabolic functions whereas IGF-1R mediates growth and differentiation. However, both insulin and IGF-1 can induce both mitogenic and metabolic effects. Whether each ligand elicits both activities via its own receptor, or whether insulin exerts its mitogenic effects through its weak affinity binding to IGF-1R, and IGF-1 its metabolic effects through IR, remains controversial (De Meyts, 1994, Horm. Res. 42:152-169).

[0010] IR is a glycoprotein having molecular weight of 350-400 kDa (depending of the level of glycosylation). It is synthesized as a single polypeptide chain and proteolytically cleaved to yield a disulfide-linked monomer α-β insulin receptor. Two α-β monomers are linked by disulfide bonds between the α-subunits to form a dimeric form of the receptor (β-α-α-β-type configuration). The α subunit is comprised of 723 amino acids, and it can be divided into two large homologous domains, L1 (amino acids 1-155) and L2 (amino acids 313-468), separated by a cysteine rich region (amino acids 156-312) (Ward et al., 1995, Prot. Struct. Funct. Genet. 22:141-153). Many determinants of insulin binding seem to reside in the α-subunit. A unique feature of IR is that it is dimeric in the absence of ligand.

[0011] The sequence of IR is highly homologous to the sequence of IGF-1R. The sequence identity level varies from about 40% to 70%, depending on the position within the α-subunit. The three-dimensional structures of both receptors may therefore be similar. The crystal structure of the first three domains of IGF-1R has been determined (Garrett et al., 1998, Nature 394:395-399). The L domains consist of a single-stranded right-handed β-helix (a helical arrangement of β-strands), while the cysteine-rich region is composed of eight disulfide-bonded modules.

[0012] The β-subunit of the insulin receptor has 620 amino acid residues and three domains: extracellular, transmembrane, and cytosolic. The extracellular domain is linked by disulfide bridges to the α-subunit. The cytosolic domain includes the tyrosine kinase domain, the three-dimensional structure of which has been solved (Hubbard et al., 1994, Nature 372:746-754).

[0013] To aid in drug discovery efforts, a soluble form of a membrane-bound receptor was constructed by replacing the transmembrane domain and the intracellular domain of IR with constant domains from immunoglobulin Fc or λ subunits (Bass et al., 1996, J. Biol. Chem. 271:19367-19375). The recombinant gene was expressed in human embryonic kidney 293 cells. The expressed protein was a fully processed heterotetramer and the ability to bind insulin was similar to that of the full-length holoreceptor.

[0014] IGF-1 and insulin competitively cross-react with IGF-1R and IR. (L. Schäffer, 1994, Eur. J. Biochem. 221:1127-1132). Despite 45% overall amino acid identity, insulin and IGF-1 bind only weakly to each other's receptor. The affinity of each peptide for the non-cognate receptor is about 3 orders of magnitude lower than that for the cognate receptor (Mynarcik, et al., 1997, J. Biol. Chem. 272:18650-18655). The differences in binding affinities may be partly explained by the differences in amino acids and unique domains which contribute to unique tertiary structures of ligands (Blakesley et al., 1996, Cytokine Growth Factor Rev. 7(2):153-9).

[0015] Both insulin and IGF-1 are expressed as precursor proteins comprising, among other regions, contiguous A, B, and C peptide regions, with the C peptide being an intervening peptide connecting the A and B peptides. A mature insulin molecule is composed of the A and B chains connected by disulfide bonds, where the connecting C peptide has been removed during post-translational processing. IGF-1 retains its smaller C-peptide as well as a small D extension at the C-terminal end of the A chain, making the mature IGF-1 slightly larger than insulin (Blakesley, 1996). The C region of human IGF-1 appears to be required for high affinity binding to IGF-1R (Pietrzkowski et al., 1992, Cancer Res. 52(23):6447-51). Specifically, tyrosine 31 located within this region appears to be essential for high affinity binding. Furthermore, deletion of the D domain of IGF-1 increased the affinity of the mutant IGF-1 for binding to the IR, while decreasing its affinity for the IGF-1R (Pietrzkowski et al., 1992). A further distinction between the two hormones is that, unlike insulin, IGF-1 has very weak self-association and does not hexamerize (De Meyts, 1994).

[0016] The α-subunits, which contain the ligand binding region of IR and IGF-1R, demonstrate between 47-67% overall amino acid identity. Three general domains have been reported for both receptors from sequence analysis of the α subunits, L1-Cys-rich-L2. The cysteine residues in the C-rich region are highly conserved between the two receptors; however, the cysteine-rich domains have only 48% overall amino acid identity.

[0017] Despite the similarities observed between these two receptors, the role of the domains in specific ligand binding are distinct. Through chimeric receptor studies, (domain swapping of the IR and IGF-1R α-subunits), researchers have reported that the sites of interaction of the ligands with their specific receptors differ (T. Kjeldsen et al., 1991, Proc. Natl. Acad. Sci. USA 88:4404-4408; A. S. Andersen et al., 1992, J. Biol. Chem. 267:13681-13686). For example, the cysteine-rich domain of the IGF-1R was determined to be essential for high-affinity IGF binding, but not insulin binding. When amino acids 191-290 of IGF-1R region was introduced into the corresponding region of the IR (amino acids 198-300), the modified IR bound both IGF-1 and insulin with high affinity. Conversely, when the corresponding region of the IR was introduced into the IGF-1R, the modified IGF-1R bound to IR but not IGF-1.

[0018] A further distinction between the binding regions of the IR and IGF-1R is their differing dependence on the N-terminal and C-terminal regions. Both the N-terminal and C-terminal regions (located within the putative L1 and L2 domains) of the IR are important for high-affinity insulin binding but appear to have little effect on IGF-1 binding for either IR or IGF-1R. Replacing residues in the N-terminus of IGF-1R (amino acids 1-62) with the corresponding residues of IR (amino acids 1-68) confers insulin-binding ability on IGF-1R. Within this region, residues Phe-39, Arg-41 and Pro-42 are reported as major contributors to the interaction with insulin (Williams et al., 1995). When these residues are introduced into the equivalent site of IGF-1R, the affinity for insulin is markedly increased, whereas, substitution of these residues by alanine in IR results in markedly decreased insulin affinity. Similarly, the region between amino acids 704-717 of the C-terminus of IR has been shown to play a major role in insulin specificity. Substitution of these residues with alanine also disrupts insulin binding (Mynarcik et al., 1996, J. Biol. Chem. 271(5):2439-42; C. Kristensen et al., 1999, J. Biol. Chem. 274(52):37351-37356).

[0019] Further studies of alanine scanning of the receptors suggest that insulin and IGF-1 may use some common contacts to bind to IGF-1R but that those contacts differ from those that insulin utilizes to bind to IR (Mynarcik et al., 1997). Hence, the data in the literature has led one commentator to state that even though “the binding interfaces for insulin and IGF-1 on their respective receptors may be homologous within this interface the side chains which make actual contact and determine specificity may be quite different between the two ligand-receptor systems” (De Meyts, 1994).

[0020] Based on data for binding of insulin and insulin analogs to various insulin receptor constructs, a binding model has been proposed. This model shows insulin receptor with two insulin binding sites that are positioned on two different surfaces of the receptor molecule, such that each alpha-subunit is involved in insulin binding. In this way, activation of the insulin receptor is believed to involve cross-connection of the alpha-subunits by insulin. A similar mechanism may operate for IGF-1R, but one of the receptor binding interactions appears to be different (Schäffer, 1994, Eur. J. Biochem. 221:1127-1132).

[0021] The identification of molecular structures having a high degree of specificity for one or the other receptor is important to developing efficacious and safe therapeutics. For example, a molecule developed as an insulin agonist should have little or no IGF-1 activity in order to avoid the mitogenic activity of IGF-1 and a potential for facilitating neoplastic growth. It is therefore important to determine whether insulin and IGF-1 share common three-dimensional structures but which have sufficient differences to confer selectivity for their respective receptors. Similarly, it would be desirable to identify other molecular structures that mimic the active binding regions of insulin and/or IGF-1 and which impart selective agonist or antagonist activity.

[0022] Although certain proteins are important drugs, their use as therapeutics presents several difficult problems, including the high cost of production and formulation, administration usually via injection and limited stability in the bloodstream. Therefore, replacing proteins, including insulin or IGF-1, with small molecular weight drugs has received much attention. However, to date, none of these efforts has resulted in finding an effective drug replacement.

[0023] Peptides mimicking functions of protein hormones have been previously reported. Yanofsky et al. (1996, Proc. Natl. Acad. Sci. USA 93:7381-7386) reported the isolation of a monomer antagonistic to IL-1 with nanomolar affinity for the IL-1 receptor. This effort required construction and use of many phage displayed peptide libraries and sophisticated phage-panning procedures.

[0024] Wrighton et al. (1996, Science 273:458-464) and Livnah et al. (1996, Science 273:464-471) reported dimer peptides that bind to the erythropoietin (EPO) receptor with full agonistic activity in vivo. These peptides are cyclical and have intra-peptide disulfide bonds; like the IL-1 receptor antagonist, they show no significant sequence identity to the natural ligand. Importantly, X-ray crystallography revealed that it was the spontaneous formation of non-covalent peptide homodimer peptides that enabled the dimerization two EPO receptors.

[0025] WO 96/04557 reported the identification of peptides and antibodies that bound to active sites of biological targets, which were subsequently used in competition assays to identify small molecules that acted as agonist or antagonists at the biological targets. Renchler et al. (1994, Proc. Natl. Acad. Sci. USA 91:3623-3627) reported synthetic peptide ligands of the antigen binding receptor that induced programmed cell death in human B-cell lymphoma.

[0026] Most recently, Cwirla et al. (1997, Science 276:1696-1698) reported the identification of two families of peptides that bound to the human thrombopoietin (TPO) receptor and were competed by the binding of the natural TPO ligand. The peptide with the highest affinity, when dimerized by chemical means proved to be as potent an in vivo agonist as TPO, the natural ligand.

### SUMMARY OF THE INVENTION

[0027] This invention relates to the identification of amino acid sequences that specifically recognize sites involved in IR or IGF-1R activation. Specific amino acid sequences are identified and their agonist or antagonist activity at IR and/or IGF-1R has been determined. Such sequences may be developed as potential therapeutics or as lead compounds to develop other more efficacious ones. In addition, these sequences may be used in high-throughput screens to identify and provide information on small molecules that bind at these sites and mimic or antagonize the functions of insulin or IGF-1. Furthermore, the peptide sequences provided by this invention can be used to design secondary peptide libraries, which can be used to identify sequence variants that increase or modulate the binding and/or activity of the original peptide at IR or IGF-1R.

[0028] In one aspect of this invention, large numbers of peptides have been screened for their IR and IGF-1R binding and activity characteristics. Analysis of their amino acid sequences has identified certain consensus sequences which may be used themselves or as core sequences in larger amino acid sequences conferring upon them agonist or antagonist activity. Several generic amino acid sequences are disclosed which bind IR and/or IGF-1R with varying degrees of agonist or antagonist activity depending on the specific sequence of the various peptides identified within each motif group. Also provided are amino or carboxyl terminal extensions capable of modifying the affinity and/or pharmacological activity of the consensus sequences when part of a larger amino acid sequence.

[0029] The amino acid sequences of this invention which bind IR and/or IGF-1R include:

[0030] a. X₁ X₂ X₃ X₄ X₅ wherein X₁, X₂, X₄ and X₅ are aromatic amino acids, and X₃ is any polar amino acid (Formula 1; Group 1; A6 motif);

[0031] b. X₆ X₇ X₈ X₉ X₁₀ X₁₁ X₁₂ X₁₃ wherein X₆ and X₇ are aromatic amino acids, X₈, X₉, X₁₁ and X₁₂ are any amino acid, and X₁₀ and X₁₃ are hydrophobic amino acids (Formula 2; Group 3; B6 motif);

[0032] c. X₁₄ X₁₅ X₁₆ X₁₇ X₁₈ X₁₉ X₂₀ X₂₁ wherein X₁₄, and X₁₇ are hydrophobic amino acids, X₁₅, X₁₆, X₁₈ and X₁₉ are any amino acid, and X₂₀ and X₂₁ are aromatic amino acids (Formula 3; reverse B6; revB6).

[0033] d. X₂₂ X₂₃ X₂₄ X₂₅ X₂₆ X₂₇ X₂₈ X₂₉ X₃₀ X₃₁ X₃₂ X₃₃ X₃₄ X₃₅ X₃₆ X₃₇ X₃₈ X₃₉ X₄₀ X₄₁ wherein X₂₂, X₂₅, X₂₈, X₂₉, X₃₀, X₃₃, X₃₄, X₃₅, X₃₆, X₃₇, X₃₈, X₄₀, and X₄₁ are any amino acid, X₃₅ and X₃₇ may be any amino acid for binding to IR, whereas X₃₅ is preferably a hydrophobic amino acid and X₃₇ is preferably glycine for binding to IGF-1R and possess agonist or antagonist activity. X₂₃ and X₂₆ are hydrophobic amino acids. This sequence further comprises at least two cysteine residues, preferably at X₂₅ and X₄₀ X₃₁ and X₃₂ are small amino acids (Formula 4; Group 7; E8 motif).

[0034] e.) X₄₂ X₄₃ X₄₄ X₄₅ X₄₆ X₄₇ X₄₈ X₄₉ X₅₀ X₅₁ X₅₂ X₅₃ X₅₄ X₅₅ X₅₆ X₅₇ X₅₈ X₅₉ X₆₀ X₆₁ wherein X₄₂, X₄₃, X₄₄, X₄₅, X₅₃, X₅₅, X₅₆, X₅₈, X₆₀ and X₆₁ may be any amino acid, X₄₃, X₄₆, X₄₉, X₅₀, X₅₄ are hydrophobic amino acids, X₄₇ and X₅₉ are preferably cysteines, X₄₈ is a polar amino acid, and X₅₁, X₅₂ and X₅₇ are small amino acids (Formula 5; mini F8 motif).

[0035] f. X₆₂ X₆₃ X₆₄ X₆₅ X₆₆ X₆₇ X₆₈ X₆₉ X₇₀ X₇₁ X₇₂ X₇₃ X₇₄ X₇₅ X₇₆ X₇₇ X₇₈ X₇₉ X₈₀ X₈₁ wherein X₆₂, X₆₅, X₆₈, X₆₉, X₇₁, X₇₃, X₇₆, X₇₇, X₇₈, X₈₀, and X₈₁ may be any amino acid; X₆₃, X₇₀, X₇₄ are hydrophobic amino acids; X₆₄ is a polar amino acid, X₆₇ and X₇₅ are aromatic amino acids and X₇₂ and X₇₉ are preferably cysteines capable of forming a loop (Formula 6; Group 2; D8 motif).

[0036] g. H X₈₂ X₈₃ X₈₄ X₈₅ X₈₆ X₈₇ X₈₈ X₈₉ X₉₀ X₉₁ X₉₂ wherein X₈₂ is proline or alanine, X₈₃ is a small amino acid, X₈₄ is selected from leucine, serine or threonine, X₈₅ is a polar amino acid, X₈₆, X₈₈, X₈₉ and X₉₀ are any amino acid, and X₈₇, X₉₁ and X₉₂ are an aliphatic amino acid (Formula 7).

[0037] h. X₁₀₄ X₁₀₅ X₁₀₆ X₁₀₇ X₁₀₈ X₁₀₉ X₁₁₀ X₁₁₁ X₁₁₂X₁₁₃ X₁₁₄ wherein at least one of the amino acids of X₁₀₆ through X₁₁₁, and preferably two, are tryptophan separated by three amino acids, and wherein at least one of X₁₀₄, X₁₀₅ and X₁₀₆ and at least one of X₁₁₂, X₁₁₃ and X₁₁₄ are cysteine (Formula 8); and

[0038] i. an amino acid sequence comprising the sequence JBA5: DYKDLCQSWGVRIGWLAGLCPKK (SEQ ID NO:1541) or JBA5 minus FLAG® tag and terminal lysines: LCQSWGVRIGWLAGLCP (SEQ ID NO:1542) (Formula 9).

[0039] j. W X₁₂₃ G Y X₁₂₄W X₁₂₅ X₁₂₆ (SEQ ID NO:1543)wherein X₁₂₃ is selected from proline, glycine, serine, arginine, alanine or leucine, but more preferably proline; X₁₂₄ is any amino acid, but preferably a charged or aromatic amino acid; X₁₂₅ is a hydrophobic amino acid preferably leucine or phenylalanine, and most preferably leucine. X₁₂₆ is any amino acid, but preferably a small amino acid (Formula 10; Group 6 motif).

[0040] In one embodiment, peptides comprising a preferred amino acid sequence FYX₃ WF (SEQ ID NO: 1544) (Formula 1; Group 1; A6 motif) have been identified which competitively bind to sites on IR. Surprisingly, peptides comprising an amino acid sequence FYX₃WF (SEQ ID NO:1544) can possess agonist or antagonist activity at IR.

[0041] This invention also identifies at least two distinct binding sites on IR based on the differing ability of certain of the peptides to compete with one another and insulin for binding to IR. Accordingly, this invention provides amino acid sequences that bind specifically to one or both sites of IR. Furthermore, specific amino acid sequences are provided which have either agonist or antagonist characteristics based on their ability to bind to the specific sites of IR.

[0042] In another embodiment of this invention, amino acid sequences which bind to one or more sites of IR or IGF-1R (e.g., Site 1 or Site 2) are covalently linked together to form multivalent ligands. These multivalent ligands are capable of forming complexes with a plurality of IR or IGF-1R. Either the same or different amino acid sequences are covalently bound together to form homo- or heterocomplexes.

[0043] In various aspects of the invention, monomer subunits are covalently linked at their N-termini or C-termini to form N—N, C—C, N—C, or C—N linked dimer peptides. In one example, dimer peptides are used to form receptor complexes bound through the same corresponding sites, e.g., Site 1-Site 1 or Site 2-Site 2 dimers. Alternatively, heterodimer peptides are used to bind to different sites on one receptor or to cause receptor complexing through different sites, e.g., Site 1-Site 2 or Site 2-Site 1 dimers. In one novel aspect of the invention, Site 2-Site 1 dimers find use as insulin agonists, while certain Site 1-Site 2 dimers find use as insulin antagonists.

[0044] In various embodiments, insulin agonists comprise Site 1-Site 1 dimer peptide sequences S325, S332, S333, S335, S337, S353, S374-S376, S378, S379, S381, S414, S415, and S418; whereas other insulin agonists comprise Site 2-Site 1 dimer peptide sequences S455, S457, S458, S467, S468, S471, S499, S510, S518, S519, and S520, as described herein below. In one preferred embodiment, an insulin agonist comprises the sequence of the S519 dimer peptide, which shows insulin-like activity in both in vitro and in vivo assays.

[0045] The present invention also provides assays for identifying compounds that mimic the binding characteristics of insulin or IGF-1. Such compounds may act as antagonists or agonists of insulin or IGF-1 function in cell based assays.

[0046] This invention further provides kits for identifying compounds that bind to IR and/or IGF-1R. Also provided are therapeutic compounds that bind the insulin receptor or the IGF-1 receptor.

[0047] Other embodiments of this invention are the nucleic acid sequences encoding the amino acid sequences of the invention. Also within the scope of this invention are vectors containing the nucleic acids and host cells which express the nucleic acids encoding the amino acid sequences which bind at IR and/or IGF-1R and possess agonist or antagonist activity.

[0048] This invention also provides amino acid sequences that bind to active sites of IR and/or IGF-1R and to identify structural criteria for conferring agonist or antagonist activity at IR or IGF-1R.

[0049] This invention further provides specific amino acid sequences that possess agonist, partial agonist, or antagonist activity at either IR or IGF-1R. Such amino acid sequences are potentially useful as therapeutics themselves or may be used to identify other molecules, especially small organic molecules, which possess agonist or antagonist activity at IR or IGF-1R.

[0050] In addition, the present invention provides structural information derived from the amino acid sequences of this invention, which may be used to construct other molecules possessing the desired activity at the relevant IR binding site.

### BRIEF DESCRIPTION OF THE DRAWINGS

[0051] FIGS. 1A-1O; 2A-2E; 3A-3E; 4A-4I; 43A-43B, 44A-44B: Amino acid sequences identified by panning peptide libraries against IGF-1R and/or IR. The amino acids are represented by their one-letter abbreviation. The ratios over background are determined by dividing the signal at 405 nm (E-Tag, IGF-1R, or IR) by the signal at 405 nm for non-fat milk. The IGF-1R/IR Ratio Comparison is determined by dividing the ratio of IGF-1R by the ratio of IR. The IR/IGF-1R Ratio Comparison is determined by dividing the ratio of IR by the ratio of IGF-1R. HIT indicates binder; CAND indicates binder candidate; LDH indicates binding to lactate dehydrogenase (negative control); Sp/Irr indicates the ratio of specific binding over non-specific binding.

[0052] The design of each library is shown in the first line in bold. In the design, symbol ‘X’ indicates a random position, an underlined amino acid indicates a doped position at the nucleotide level, and other positions are held constant. Additional abbreviations in the B6H library are: ‘O’ indicates an NGY codon where Y is C or T; ‘J’ indicates an RHR codon where R is A or G, and H is A, C, or T; and ‘U’ indicates an VVY codon where V is A, C, or G, and Y is C or T. The ‘h’ in the 20E2 libraries indicates an NTN codon.

[0053] Symbols in the listed sequences are: Q—TAG Stop; #—TAA Stop; *—TGA Stop; and ?—Unknown Amino Acid. It is believed that a W replaces the TGA Stop Codon when expressed. Except for the 20C and A6L libraries, all libraries are designed with the short FLAG® Epitope DYKD (SEQ ID NO:1545; Hopp et al., 1988, Bio/Technology 6:1205-1210) at the N-terminus of the listed sequence and AAAGAP (SEQ ID NO:1546) at the C-terminus. The 20C and A6L libraries have the full length FLAG® epitope DYKDDDDK (SEQ ID NO:1547).

[0054] FIG. 1A: Formula 1 motif peptide sequences obtained from a random 40mer library panned against IR (SEQ ID NOS1-3).

[0055] FIG. 1B: Formula 1 motif peptide sequence obtained from a random 40mer library panned against IGF-1R (SEQ ID NOS4-6).

[0056] FIG. 1C: Formula 1 motif peptide sequences obtained from a random 20mer library panned against IR (SEQ ID NOS7-29).

[0057] FIG. 1D: Formula 1 motif peptide sequences obtained from a random 20mer library panned against IGF-1R (SEQ ID NOS30-33).

[0058] FIG. 1E: Formula 1 motif peptide sequences obtained from a 21 mer library constructed to contain X₁₋₁₀NFYDWFVX₁₈₋₂₁ (SEQ ID NO:34; also referred to as “A6S”) panned against IR (SEQ ID NOS35-98).

[0059] FIG. 1F: Formula 1 motif peptide sequences obtained from a 21 mer library constructed to contain X₁₋₁₀NFYDWFVX₁₈₋₂₁ (SEQ ID NO:34; also referred to as “A6S”) panned against IGF-1R (SEQ ID NOS99-166).

[0060] FIG. 1G: Formula 1 motif peptide sequences obtained from a library constructed to contain variations outside the consensus core of the A6 peptide as indicated (referred to as “A6L” (SEQ ID NO: 167)) panned against IR (SEQ ID NOS168-216).

[0061] FIG. 1H: Formula 1 motif peptide sequences obtained from a library constructed to contain variations outside the consensus core of the A6 peptide as indicated (referred to as “A6L” (SEQ ID NO: 167)) panned against IGF-1R (SEQ ID NOS217-244).

[0062] FIG. 1I: Formula 1 motif peptide sequences obtained from a library constructed to contain variations in the consensus core of the E4D peptide (SEQ ID NO: 245) (as indicated) panned against IR (SEQ ID NOS246-305).

[0063] FIG. 1J: Formula 1 motif peptide sequences obtained from a library constructed to contain variations in the consensus core of the E4D peptide (SEQ ID NO: 245) (as indicated) panned against IGF-1R (SEQ ID NOS306-342).

[0064] FIG. 1K: Formula 1 motif peptide sequences obtained from a library constructed using the sequence X₁₋₁₆FHENFYDWFVRQVSX₂₁₋₂₆ (SEQ ID NO:343; H₂C-A) panned against IR (SEQ ID NOS344-430).

[0065] FIG. 1L: Formula 1 motif peptide sequences obtained from a library constructed using the sequence X₁₋₁₆FHENFYDWFVRQVSX₂₁₋₂₆ (SEQ ID NO:343; H2C-A) panned against IGF-1R (SEQ ID NOS431-467).

[0066] FIG. 1M: Formula 1 motif peptide sequences obtained from a library constructed using the sequence X₁₋₁₆FHXXFYXWFX₁₆₋₂₁ (SEQ ID NO:468; H2C-B) and panned against IR (SEQ ID NOS469-575).

[0067] FIG. 1N: Formula 1 motif peptide sequences obtained from a library constructed using the sequence X₁₋₁₆FHXXFYXWFX₁₆₋₂₁ (SEQ ID NO:468; H2C-B) and panned against IGF-1R (SEQ ID NOS576-657).

[0068] FIG. 1O: Formula 1 motif peptide sequences obtained from other libraries panned against IR (SEQ ID NOS658-712).

[0069] FIG. 2A: Formula 4 motif peptide sequences identified from a random 20mer library panned against IR (SEQ ID NO:713).

[0070] FIG. 2B: Formula 4 motif peptide sequences identified from a library constructed to contain variations in the F8 peptide (SEQ ID NO:713) as indicated (15% dope; referred to as “F815”) panned against IR (SEQ ID NOS714-796).

[0071] FIG. 2C: Formula 4 motif peptide sequences identified from a library constructed to contain variations in the F8 peptide (SEQ ID NO:713) as indicated (15% dope; referred to as “F815”) panned against IGF-1R (SEQ ID NOS797-811).

[0072] FIG. 2D: Formula 4 motif peptide sequences identified from a library constructed to contain variations in the F8 peptide (SEQ ID NO: 713)as indicated (20% dope; referred to as “F820”) panned against IR (SEQ ID NOS812-861).

[0073] FIG. 2E: Formula 4 motif peptide sequences identified from other libraries panned against IR (SEQ ID NOS862-925).

[0074] FIG. 3A: Formula 6 motif peptide sequences identified from a random 20mer library and panned against IR (SEQ ID NOS926-928).

[0075] FIG. 3B: Formula 6 motif peptide sequences identified from a library constructed to contain variations in the D8 peptide (SEQ ID NO: 929) as indicated (15% dope; referred to as “D815”) panned against IR (SEQ ID NOS930-967).

[0076] FIG. 3C: Formula 6 motif peptide sequences identified from a library constructed to contain variations in the D8 peptide (SEQ ID NO: 929) as indicated (20% dope; referred to as “D820”) panned against IR (SEQ ID NOS968-1010).

[0077] FIG. 3D: Formula 6 motif peptide sequences identified from a library constructed to contain variations in the D8 peptide (SEQ ID NO: 929) as indicated (20% dope; referred to as “D820”) panned against IGF-1R (SEQ ID NOS1011-1059).

[0078] FIG. 3E: Formula 6 motif peptide sequences identified from other libraries panned against IR (SEQ ID NOS1060-1061).

[0079] FIG. 4A: Formula 10 motif peptide sequences identified from random 20mer libraries panned against IGF-1R (SEQ ID NOS1062-1077).

[0080] FIG. 4B: Formula 10 motif peptide sequences identified from random 20mer libraries panned against IR (SEQ ID NOS1078-1082).

[0081] FIG. 4C: Miscellaneous peptide sequences identified from a random 20mer library panned against IR (SEQ ID NOS1083-1086).

[0082] FIG. 4D: Miscellaneous peptide sequences identified from a random 40mer library panned against IR (SEQ ID NOS1087-1088).

[0083] FIG. 4E: Miscellaneous peptide sequences identified from a random 20mer library panned against IGF-1R (SEQ ID NOS1089-1092).

[0084] FIG. 4F: Miscellaneous peptide sequences identified from an X₁₋₄ C X₆₋₂₀ library and panned against IGF-1R (SEQ ID NOS1093-1113).

[0085] FIG. 4G: Miscellaneous peptide sequences identified from a library constructed to contain variations of the F8 peptide (SEQ ID NO: 1114) as indicated (F815) panned against IGF-1R (SEQ ID NOS1115-1118).

[0086] FIG. 4H: Miscellaneous peptide sequences identified from a library constructed to contain variations in the F8A11 peptide (SEQ ID NO: 1119) as indicated (referred to as “NNKH”) panned against IR (SEQ ID NOS1120-1142).

[0087] FIG. 4I: Miscellaneous peptide sequences identified from a library constructed to contain variations in the F8A11 peptide (SEQ ID NO: 1119) as indicated (referred to as “NNKH”) panned against IGF-1R (SEQ ID NOS1143-1154).

[0088] FIG. 5A: Summary of specific representative amino acid sequences from Formulas 1, 4, 6, and 10 (SEQ ID NOS1155-1180).

[0089] FIG. 5B: Summary of specific representative amino acid sequences from Formulas 1, 4, 6, and 10 (SEQ ID NOS1181-1220).

[0090] FIG. 6: Illustration of 2 binding site domains on IR based on competition data.

[0091] FIG. 7: Schematic illustration of potential binding schemes to the multiple binding sites on IR.

[0092] FIG. 8: Biopanning results and sequence alignments of Group 1 of IR-binding peptides (SEQ ID NOS1221-1243). The number of sequences found is indicated on the right side of the figure together with data on the phage binding to either IR or IGF-1R receptor. Absorbance signals are indicated by: ++++, >30× over background; +++, 15-30×; ++, 5-15×; +, 2-5×; and 0, <2×.

[0093] FIGS. 9A-9B: Biopanning results and sequence alignments of Groups 2, 6, and 7 of IR-binding peptides (SEQ ID NOS1244-1261). The number of sequences found is indicated on the right side of the figure together with data on the phage binding to either IR or IGF-1R receptor. Absorbance signals are indicated by: ++++, >30× over background; +++, 15-30×; ++, 5-15×; +, 2-5×; and 0, <2×.

[0094] FIGS. 10A-10C: Insulin competition data determined for various monomer and dimer peptides. FIG. 10A shows the competition curve. FIG. 10B shows the symbol key for the peptides. FIG. 10C shows the description of the peptides.

[0095] FIGS. 11A-11D: Insulin competition data determined for various monomer and dimer peptides. FIG. 11A shows the competition curve. FIG. 11B shows the symbol key for the peptides. FIG. 11C shows the description of the peptides. FIG. 11D shows IR binding affinity for the peptides.

[0096] FIGS. 12A-12D: Results of free fat cell assays for truncated synthetic RP9 monomer peptides, S390 and S394. FIG. 12A shows the results for peptide S390.

[0097] FIG. 12B shows the results for peptide S394. FIG. 12C shows the amino acid sequence of peptides S390 and S394 (SEQ ID NOS:1794 and 1788, respectively in order of appearance). FIG. 12D shows the results for full-length RP9 peptide.

[0098] FIGS. 13A-13C: Results of free fat cell assays for truncated synthetic RP9 dimer peptides, S415 and S417. FIG. 13A shows the results for peptide S415.

[0099] FIG. 13B shows the results for peptide S417. FIG. 13C shows the amino acid sequence of peptides S415 and S417 (SEQ ID NOS1795-1796).

[0100] FIGS. 14A-14C: Results of free fat cell assays for RP9 homodimer peptides, 521 and 535. FIG. 14A shows the results for peptide 521. FIG. 14B shows the results for peptide 535. FIG. 14C shows the amino acid sequence of peptides 521 and 535.

[0101] FIGS. 15A-15C: Results of free fat cell assays for RP9-D8 heterodimer peptides, 537 and 538. FIG. 15A shows the results for peptide 537. FIG. 15B shows the results for peptide 538. FIG. 15C shows the amino acid sequence of peptides 537 and 538.

[0102] FIGS. 16A-16C: Results of free fat cell assays for RP9-D8 heterodimer peptides 537 and 538. FIG. 16A shows the results for peptide 537. FIG. 16B shows the results for peptide 538. FIG. 16C shows the amino acid sequence of peptides 537 and 538.

[0103] FIGS. 17A-17B: Results of free fat cell assays for D8-RP9 heterodimer peptide, 539. FIG. 17A shows the results for peptide 539. FIG. 17B shows the amino acid sequence of peptide 539.

[0104] FIGS. 18A-18D: Results of free fat cell assays for Site 1/Site 2 dimer peptides with constituent monomer peptides with Site 1-Site 2 C—N (FIG. 18A), Site 1-Site 2, N—N (FIG. 18B), Site 1-Site 2, C—C (FIG. 18C), and Site 2-Site 1, C—N (FIG. 18D) orientations and linkages, respectively.

[0105] FIGS. 19A-19B: Results of human insulin receptor kinase assays for various monomer and dimer peptides. FIG. 19A shows the substrate phosphorylation curve.

[0106] FIG. 19B shows the EC₅₀ values.

[0107] FIGS. 20A-20B: Results of human insulin receptor kinase assays for Site 1—Site 2 and Site 2-Site 1 dimer peptides. FIG. 20A shows the substrate phosphorylation curve. FIG. 20B shows the EC₅₀ values.

[0108] FIGS. 21A-21B: Results of human insulin receptor kinase assays for Site 1-Site 2 and Site 2-Site 1 peptides. FIG. 21A shows the substrate phosphorylation curve. FIG. 21B shows the EC₅₀ values.

[0109] FIGS. 22A-22B: Results of time-resolved fluorescence resonance transfer assays for assessing the ability of various monomer and dimer peptides to compete with biotinylated RP9 monomer peptide for binding to soluble human insulin receptor-immunoglobulin heavy chain chimera. FIG. 22A shows the binding curve. FIG. 22B shows the symbol key and description of the peptide sequences (SEQ ID NOS:2117, 1916-1917, 1558, 1994, 1960-1961, 2008, 1794, 2015-2016, 1560, and 2001-2002, respectively in order of appearance).

[0110] FIGS. 23A-23C: Results of time-resolved fluorescence resonance transfer assays indicating the ability of various monomer and dimer peptide to compete with biotinylated S175 monomer peptide or biotinylated RP9 monomer peptide for binding to soluble human insulin receptor-immunoglobulin heavy chain chimera. FIGS. 23A-23B show the binding curves. FIG. 23C shows the symbol key and description of the peptide sequences (SEQ ID NOS:2117, 1916-1917, 1558, 1994, 1960-1961, 2008, 1794, 2015-2016, 1560, and 2001-2002, respectively in order of appearance).

[0111] FIGS. 24A-24B: Results of fluorescence polarization assays indicating the ability of various monomer and dimer peptide to compete with fluoroscein labeled RP9 monomer peptide for binding to soluble human insulin receptor ectodomain. FIG. 24A shows the binding curve. FIG. 24B shows the symbol key and description of the peptide sequences (SEQ ID NOS:2117, 1916-1917, 1558, 1994, 1960-1961, 2008, 1794, 2015-2016, 1560 and 2001-2002, respectively in order of appearance).

[0112] FIGS. 25A-25B: Results of fluorescence polarization assays indicating the ability of various monomer and dimer peptides to compete with fluoroscein labeled RP9 monomer peptide for binding to soluble human insulin mini-receptor. FIG. 25A shows the binding curve. FIG. 25B shows the symbol key and description of the peptide sequences (SEQ ID NOS:2117, 1916-1917, 1558, 1994, 1960-1961, 2008, 1794, 2015-2016, 1560, and 2001-2002, respectively in order of appearance).

[0113] FIGS. 26A-26B: Results of fluorescence polarization assays indicating the ability of various monomer and dimer peptides to compete with fluorescein labeled insulin for binding to soluble human insulin receptor ectodomain. FIG. 26A shows the binding curve. FIG. 26B shows the symbol key and description of the peptide sequences (SEQ ID NOS:2117, 1916-1917, 1558, 1994, 1960-1961, 2008, 1794, 2015-2016, 1560, and 2001-2002, respectively in order of appearance).

[0114] FIGS. 27A-27B: Results of fluorescence polarization assays indicating the ability of various monomer and dimer peptides to compete with fluorescein labeled insulin for binding to soluble human insulin mini-receptor. FIG. 27A shows the binding curve. FIG. 27B shows the symbol key and description of the peptide sequences (SEQ ID NOS:2117, 1916-1917, 1558, 1994, 1960-1961, 2008, 1794, 2015-2016, 1560, and 2001-2002, respectively in order of appearance).

[0115] FIG. 28: A schematic drawing for the construction of protein fusions of the maltose binding protein.

[0116] FIG. 29: BIAcore analysis of competition binding between IR and maltose binding protein fusion peptides H2C-9aa-H2C, H2C, and H2C-3aa-H2C.

[0117] FIG. 30: Stimulation of IR autophosphorylation in vivo by maltose binding protein fusion peptides.

[0118] FIGS. 31A-31C: Results of free fat cell assays for insulin and Site 2-Site 1 peptides, S519 and S520. FIG. 31A shows the results for S519. FIG. 31B shows the results for S520. FIG. 31C shows the EC₅₀ values.

[0119] FIGS. 32A-32B: Results of human insulin receptor kinase assays for insulin and Site 2-Site 1 peptides S519 and S520. FIG. 32A shows the substrate phosphorylation curve. FIG. 32B shows the calculated Bestfit values.

[0120] FIG. 33: Results of in vivo experiments showing the effect of intravenous administration of Site 2-Site 1 peptide S519 in Wistar rats:

[0121] FIGS. 34A-34E: Results of phage competition studies with IGF-1 surrogates RP9 (Site 1) and D815 (Site 2) peptides. Phage: RP9 (A6-like); RP6 (B6-like); D8B12 (Site 2); and D815 (Site 2); Peptides: RP9 and D815. FIGS. 34A-34B show the competition curves. FIGS. 34C-34E show the symbol keys and peptide groups.

[0122] FIG. 35A-35E: Phage competition studies with Site 2-Site 1 dimer peptides containing 6- or 12-amino acid linkers. Phage: RP9, RP6, D8B12, and D815; Peptides: D815-6L-RP9 and D815-12L-RP9. FIGS. 35A-35B show the competition curves. FIGS. 35C-35E show the symbol keys and peptide groups.

[0123] FIG. 36: Results of IGF-1 agonist assay using FDCP-2 cells. Site 1 peptides RP6, RP9, G33, and Site 2 peptide D815 were tested in the agonist assay.

[0124] FIG. 37: Results of IGF-1 antagonist assay using FDCP-2 cells. Site 1 peptides RP6, RP9, G33, and Site 2 peptide D815 were tested in the antagonist assay.

[0125] FIG. 38: Results of IGF-1 agonist assay using FDCP-2 cells. Site 1 peptides 20E2, S175, and RP9 were tested in the agonist assay.

[0126] FIGS. 39: Results of agonist and antagonist studies with surrogate monomers and dimers. Monomers: D815 and RP9; Dimers: D815-6aa-RP9 and D815-12aa-RP9.

[0127] FIG. 40: Results of agonist and antagonist studies with surrogate monomers and dimers. Monomers: G33 and D815; Dimer: D815-6aa-G33.

[0128] FIG. 41: Results of agonist and antagonist studies with surrogate peptides and dimers. Monomers: G33, D815 and RP9; Dimers: D815-6aa-RP9 and D815-12aa-RP9.

[0129] FIG. 42: IGF-1 standard curve using FDCP-2 cells.

[0130] FIGS. 43A-43B: Peptide monomers identified from G33 and RP6 secondary libraries panned against IGF-1R (SEQ ID NOS1262-1432). FIG. 43A shows peptides from G33 secondary library; FIG. 43B shows peptides from RP6 secondary library.

[0131] FIGS. 44A-44B: Peptide dimers identified from libraries panned against IR or IGF-1R (SEQ ID NOS1433-1540). FIG. 44A shows dimer peptides panned against IR; FIG. 44B shows dimer peptides panned against IGF-1R.

[0132] FIG. 45: Results of heterogeneous time-resolved fluorometric assays showing the effect of recombinant peptide surrogate G33 (rG33) on the binding of biotinylated-recombinant human IGF-1 (b-rhIGF-1) to recombinant human IGF-1R (rhIGF-1R).

[0133] FIG. 46: Results of heterogeneous time-resolved fluorometric assays showing the effect of recombinant peptide surrogate D815 (rD815) on the binding of biotinylated-recombinant human IGF-1 (b-rhIGF-1) to recombinant human IGF-1R (rhIGF-1R).

[0134] FIG. 47: Results of heterogeneous time-resolved fluorometric assays showing the effect of recombinant peptide surrogate RP9 on the binding of biotinylated-recombinant human IGF-1 (b-rhIGF-1) to recombinant human IGF-1R (rhIGF-1R).

[0135] FIG. 48: Results of heterogeneous time-resolved fluorometric assay showing the effect of recombinant peptide surrogate D815-6-G33 on the binding of biotinylated-recombinant human IGF-1 (b-rhIGF-1) to recombinant human IGF-1R (rhIGF-1R).

[0136] FIG. 49: Results of heterogeneous time-resolved fluorometric assays showing the effect of recombinant peptide surrogate D815-6-RP9 on the binding of biotinylated-recombinant human IGF-1 (b-rhIGF-1) to recombinant human IGF-1R (rhIGF-1R).

[0137] FIG. 50: Results of heterogeneous time-resolved fluorometric assays showing the effect of recombinant peptide surrogate D815-12-RP9 on the binding of biotinylated-recombinant human IGF-1 (b-rhIGF-1) to recombinant human IGF-1R (rhIGF-1R).

[0138] FIG. 51: Results of heterogeneous time-resolved fluorometric assays showing the effect of IGF-1 on the binding of biotinylated-recombinant human IGF-1 (b-rhIGF-1) to recombinant human IGF-1R (rhIGF-1R).

[0139] FIG. 52: Results of time-resolved fluorescence resonance energy transfer assays showing the effect of Site 1 peptide surrogates, Site 2 peptide surrogates, and rhIGF-1 on the dissociation of biotinylated-20E2 (b-20E2, Site 1) from recombinant human IGF-1R.

[0140] FIG. 53: Results of time-resolved fluorescence resonance energy transfer assays showing the effect of various peptide monomers and dimers on the dissociation of biotinylated-20E2 (b-20E2, Site 1) from recombinant human IGF-1R.

[0141] FIG. 54: Results of glucose uptake assays in SGBS cells showing the potency of peptide S597 relative to human insulin.

[0142] FIG. 55: Results of glucose-lowering assays in rats showing the potency of peptide S557 and S597 relative to human insulin.

[0143] FIG. 56: Results of glucose-lowering assays in fasted Goettingen minipigs showing the potency of peptide S597 relative to human insulin.

[0144] FIG. 57: Results of studies of disappearance of I¹²⁵-labelled peptides from site of injection.

### DETAILED DESCRIPTION OF THE INVENTION

[0145] This invention relates to amino acid sequences comprising motifs that bind to the insulin receptor (IR) and/or insulin-like growth factor receptor (IGF-1R). In addition to binding to IR and/or IGF-1R, the amino acid sequences also possess either agonist, partial agonist or antagonist activity at IR or IGF-1R. In addition, the amino acid sequences bind to separate binding sites (Sites 1 or 2) on IR or IGF-1R.

[0146] Although capable of binding to IR or IGF-1R at sites which participate in conferring agonist or antagonist activity, the amino acid sequences are not based on the native insulin or IGF-1 sequences, nor do they reflect an obvious homology to any such sequences.

[0147] The amino acid sequences of the invention may be peptides, polypeptides, or proteins. These terms as used herein should not be considered limiting with respect to the size of the various amino acid sequences referred to herein and which are encompassed within this invention. Thus, any amino acid sequence comprising at least one of the IR or IGF-1R binding motifs disclosed herein, and which binds to IR or IGF-1R is within the scope of this invention. In preferred embodiments, the amino acid sequences confer insulin or IGF-1 agonist or antagonist activity. The amino acid sequences of the invention are typically artificial, i.e., non-naturally occurring, peptides, or polypeptides. Amino acid sequences useful in the invention may be obtained through various means such as chemical synthesis, phage display, cleavage of proteins or polypeptides into fragments, or by any means which amino acid sequences of sufficient length to possess binding ability may be made or obtained.

[0148] The amino acid sequences provided by this invention should have an affinity for IR sufficient to provide adequate binding for the intended purpose. Thus, for use as a therapeutic, the peptide, polypeptide, or protein provided by this invention should have an affinity (K_{d}) of between about 10⁻⁷ to about 10⁻¹⁵ M. More preferably the affinity is 10⁻⁸ to about 10⁻¹² M. Most preferably, the affinity is 10⁻¹⁰ to about 10⁻¹² M. For use as a reagent in a competitive binding assay to identify other ligands, the amino acid sequence preferably has affinity for the receptor of between about 10⁻⁵ to about 10⁻¹² M.

[0149] The present invention describes several different binding motifs, which bind to active sites on IR or IGF-1R. The binding motifs are defined based on the analysis of several different amino acid sequences and analyzing the frequency that particular amino acids or types of amino acids occur at a particular position of the amino acid sequence as described in the related applications of Beasley et al. International Application PCT/US00/08528, filed Mar. 29, 2000, and Beasley et al., U.S. application Ser. No. 09/538,038, filed Mar. 29, 2000.

[0150] Also included within the scope of this invention are amino acid sequences containing substitutions, additions, or deletions based on the teachings disclosed herein and which bind to IR or IGF-1R with the same or altered affinity. For example, sequence tags (e.g., FLAG® tags) or amino acids, such as one or more lysines, can be added to the peptide sequences of the invention (e.g., at the N-terminal or C-terminal ends) as described in detail herein. Sequence tags can be used for peptide purification or localization. Lysines can be used to increase peptide solubility or to allow for biotinylation. Alternatively, amino acid residues located at the carboxy and amino terminal regions of the consensus motifs described below, which comprise sequence tags (e.g., FLAG® tags), or which contain amino acid residues that are not associated with a strong preference for a particular amino acid, may optionally be deleted providing for truncated sequences. Certain amino acids (e.g., C-terminal or N-terminal residues) such as lysine which promote the stability or biotinylation of the amino acids sequences may be deleted depending on the use of the sequence, as for example, expression of the sequence as part of a larger sequence which is soluble, or linked to a solid support.

[0151] Peptides that bind to IR or IGF-1R, and methods and kits for identifying such peptides, have been disclosed by Beasley et al., International Application PCT/US00/08528 filed Mar. 29, 2000 and Beasley et al., U.S. application Ser. No. 09/538,038 filed Mar. 29, 2000, which are incorporated by reference in their entirety.

[0152] Consensus Motifs

[0153] The following motifs have been identified as conferring binding activity to IR and/or IGF-1R:

[0154] 1. X₁X₂X₃X₄X₅ (Formula 1; Group 1; the A6 motif) wherein X₁, X₂, X₄ and X₅ are aromatic amino acids, preferably, phenylalanine or tyrosine. Most preferably, X₁ and X₅ are phenylalanine and X₂ is tyrosine. X₃ may be any small polar amino acid, but is preferably selected from aspartic acid, glutamic acid, glycine, or serine, and is most preferably aspartic acid or glutamic acid. X₄ is most preferably tryptophan, tyrosine, or phenylalanine and most preferably tryptophan. Particularly preferred embodiments of the A6 motif are FYDWF (SEQ ID NO:1554) and FYEWF (SEQ ID NO:1555). The A6 motif possesses agonist activity at IGF-1R, but agonist or antagonist activity at IR depending on the identity of amino acids flanking A6. See FIG. 5A.

[0155] Amino acid sequences that comprise the A6 motif and possess agonist activity at IR, include but are not limited to, D117/H2C: FHENFYDWFVRQVSKK (SEQ ID NO:1556); D117/H2 minus terminal lysines: FHENFYDWFVRQVS (SEQ ID NO:1557); RP9: GSLDESFYDWFERQLGKK (SEQ ID NO:1558); RP9 minus terminal lysines: GSLDESFYDWFERQLG (SEQ ID NO:1559); and S175: GRVDWLQRNANFYDWFVAELG (SEQ ID NO:1560). Preferred RP9 sequences include GLADEDFYEWFERQLR (SEQ ID NO:1561), GLADELFYEWFDRQLS (SEQ ID NO:1562), GQLDEDFYEWFDRQLS (SEQ ID NO:1563), GQLDEDFYAWFDRQLS (SEQ ID NO:1564), GFMDESFYEWFERQLR (SEQ ID NO:1565), GFWDESFYAWFERQLR (SEQ ID NO:1566), GFMDESFYAWFERQLR (SEQ ID NO:1567), and GFWDESFYEWFERQLR (SEQ ID NO:1568). Nonlimiting examples of Group 1 (Formula 1; A6) amino acid sequences are shown in FIGS. 1A-1O.

[0156] 2. X₆X₇X₈X₉X₁₀X₁₁X₁₂X₁₃ (Formula 2, Group 3; the B6 motif) wherein X₆ and X₇ are aromatic amino acids, preferably, phenylalanine or tyrosine. Most preferably, X₆ is phenylalanine and X₇ is tyrosine. X₈, Xg, X₁₁, and X₁₂ may be any amino acid. X₁₀ and X₁₃ are hydrophobic amino acids, preferably leucine, isoleucine, phenylalanine, tryptophan or methionine, but more preferably leucine or isoleucine. X₁₀ is most preferably isoleucine for binding to IR and leucine for binding to IGF-1R. X₁₃ is most preferably leucine. Amino acid sequences of Formula 2 may function as an antagonist at the IGF-1R, or as an agonist at the IR. Preferred consensus sequences of the Formula 2 motif are FYX₈ X₉ I X₁₁ X₁₂ L (SEQ ID NO:1569), F Y X₈ X₉ I X₁₁ X₁₂ L (SEQ ID NO:1570), F Y X₈A I X₁₁ X₁₂ L (SEQ ID NO:1571), and F Y X₈Y F X₁₁ X₁₂ L (SEQ ID NO:1572).

[0157] Another Formula 2 motif for use with this invention comprises F Y X₈Y F X₁₁ X₁₂ L (SEQ ID NO:1573) and is shown as Formula 2A (“NNRP”) below: X₁₁₅ X₁₁₆ X₁₁₇ X₁₁₈ F Y X₈ Y F X₁₁ X₁₂ L X₁₁₉ X₁₂₀ X₁₂₁ X₁₂₂, (SEQ ID NO:1574) wherein X₁₁₅-X₁₁₈ and X₁₁₈-X₁₂₂ may be any amino acid which allows for binding to IR or IGF-1R. X₁₁₅ is preferably selected from the group consisting of tryptophan, glycine, aspartic acid, glutamic acid, and arginine. Aspartic acid, glutamic acid, glycine, and arginine are more preferred. Tryptophan is most preferred. The preference for tryptophan is based on its presence in clones at a frequency three to five fold higher than that expected over chance for a random substitution, whereas aspartic acid, glutamic acid and arginine are present about two fold over the frequency expected for random substitution.

[0158] X₁₁₆ preferably is an amino acid selected from the group consisting of aspartic acid, histidine, glycine, and asparagine. X₁₁₇ and X₁₁₈ are preferably glycine, aspartic acid, glutamic acid, asparagine, or alanine. More preferably X₁₁₇ is glycine, aspartic acid, glutamic acid and asparagine whereas X₁₁₈ is more preferably glycine, aspartic acid, glutamic acid or alanine. X₈ when present in the Formula 2A motif is preferably arginine, glycine, glutamic acid, or serine. X₁₁ when present in the Formula 2A motif is preferably glutamic acid, asparagine, glutamine, or tryptophan, but most preferably glutamic acid. X₁₂ when present in the Formula 2A motif is preferably aspartic acid, glutamic acid, glycine, lysine or glutamine, but most preferably aspartic acid. X₁₁₉ is preferably glutamic acid, glycine, glutamine, aspartic acid or alanine, but most preferably glutamic acid. X₁₂₀ is preferably glutamic acid, aspartic acid, glycine or glutamine, but most preferably glutamic acid. X₁₂₁ is preferably tryptophan, tyrosine, glutamic acid, phenylalanine, histidine, or aspartic acid, but most preferably tryptophan or tyrosine. X₁₂₂ is preferably glutamic acid, aspartic acid or glycine; but most preferably glutamic acid. Preferred amino acid residue are identified based on their frequency in clones over two fold over that expected for a random event, whereas the more preferred sequences occur about 3-5 times as frequently as expected.

[0159] 3. X₁₄X₁₅X₁₆X₁₇X₁₈X₁₉X₂₀X₂₁ (Formula 3, reverse B6, revB6), wherein X₁₄ and X₁₇ are hydrophobic amino acids; X₁₄, X₁₇ are preferably leucine, isoleucine, and valine, but most preferably leucine; X₁₅, X₁₆, X₁₈ and X₁₉ may be any amino acid; X₂₀ is an aromatic amino acid, preferably tyrosine or histidine, but most preferably tyrosine; and X₂₁ is an aromatic amino acid, but preferably phenylalanine or tyrosine, and most preferably phenylalanine. For use as an IGF-1R binding ligand, an aromatic amino acid is strongly preferred at X₁₈.

[0160] 4. X₂₂X₂₃X₂₄X₂₅X₂₆X₂₇X₂₈X₂₉X₃₀X₃₁X₃₂X₃₃X₃₄X₃₅X₃₆X₃₇X₃₈X₃₉X₄₀ X₄₁ (Formula 4; Group 7; the F8 motif) wherein X₂₂, X₂₅, X₂₆, X₂₈, X₂₉, X₃₀, X₃₃, X₃₄, X₃₅, X₃₆, X₃₇, X₃₈, X₄₀, and X₄₁ are any amino acid. X₃₅ and X₃₇ may be any amino acid when the F8 motif is used as an IR binding ligand or as a component of an IR binding ligand, however for use as an IGF-1R binding ligand, glycine is strongly preferred at X₃₇ and a hydrophobic amino acid, particularly, leucine, is preferred at X₃₅ X₂₃ is a hydrophobic amino acid. Methionine, valine, leucine or isoleucine are preferred amino acids for X₂₃, however, leucine which is most preferred for preparation of an IGF-1R binding ligand is especially preferred for preparation of an IR binding ligand. At least one cysteine is located at X₂₄ through X₂₇, and one at X₃₉ or X₄₀. Together the cysteines are capable of forming a cysteine cross-link to create a looped amino acid sequence. In addition, although a spacing of 14 amino acids in between the two cysteine residues is preferred, other spacings may also be used provided binding to IGF-1R or IR is maintained. Accordingly, other amino acids may be substituted for the cysteines at positions X₂₄ and X₃₉ if the cysteines occupy other positions.

[0161] In one embodiment, for example, the cysteine at position X₂₄ may occur at position X₂₇ which will produce a smaller loop provided that the cysteine is maintained at position X₃₉. These smaller looped peptides are described herein as Formula 5, infra. X₂₇ is any polar amino acid, but is preferably selected from glutamic acid, glutamine, aspartic acid, asparagine, or as discussed above cysteine. The presence of glutamic acid at position X₂₇ decreases binding to IR but has less of an effect on binding to IGF-1R. X₃₁ is any aromatic amino acid and X₃₂ is any small amino acid. For binding to IGF-1R, glycine or serine is preferred at position X₃₁, however, tryptophan is highly preferred for binding to IR. At position X₃₂, glycine is preferred for both IGF-1R and IR binding. X₃₆ is an aromatic amino acid. A preferred consensus sequence for F8 is X₂₂ LC X₂₅ X₂₆ E X₂₈ X₂₉X₃₀ WG X₃₃ X₃₄ X₃₅ X₃₆ X₃₇ X₃₈ C X₄₀ X₄₁ (SEQ ID NO:1575) whereas the amino acids are defined above. A more preferred F8 sequence is HLCVLEELFWGASLFGYCSG (“F8”; SEQ ID NO:1576). Amino acid sequences comprising the F8 sequence motif preferably bind to IR over IGF-1R. FIGS. 2A-2E list nonlimiting examples of Formula 4 amino acid sequences.

[0162] 5.) X₄₂ X₄₃ X₄₄ X₄₅ X₄₆ X₄₇ X₄₈ X₄₉ X₅₀ X₅₁ X₅₂ X₅₃ X₅₄ X₅₅ X₅₆ X₅₇ X₅₈ X₅₉ X₆₀ X₆₁ (Formula 5; mini F8 motif) wherein X₄₂, X₄₃, X₄₄, X₄₅, X₅₃, X₅₅, X₅₆, X₅₈, X₆₀ and X₆₁ are any amino acid. X₄₃, X₄₆, X₄₉, X₅₀ and X₅₄ are hydrophobic amino acids, however, X₄₃ and X₄₆ are preferably leucine, whereas X₅₀ is preferably phenylalanine or tyrosine but most preferably phenylalanine. X₄₇ and X₅₉ are cysteines. X₄₈ is preferably a polar amino acid, i.e., aspartic acid or glutamic acid, but most preferably glutamic acid. Use of the small amino acid at position 54 may confer IGF-1R specificity. X₅₁, X₅₂, and X₅₇ are small amino acids, preferably glycine. A preferred consensus sequence for mini F8 is X₄₂ X₄₃ X₄₄ X₄₅ L C E X₄₉ F G G X₅₃ X₅₄ X₅₅ X₅₆ G X₅₈ C X₆₀ X₆₁ (SEQ ID NO:1577). Amino acid sequences comprising the sequence of Formula 5 preferably bind to IGF-1R or IR.

[0163] 6. X₆₂ X₆₃ X₆₄ X₆₅ X₆₆ X₆₇ X₆₈ X₆₉ X₇₀ X₇₁ X₇₂ X₇₃ X₇₄ X₇₅ X₇₆ X₇₇ X₇₈ X₇₉ X₈₀ X₈₁ (Formula 6; Group 2; the D8 motif) wherein X₆₂, X₆₅, X₆₈, X₆₉, X₇₁, X₇₃, X₇₆, X₇₇, X₇₈, X₈₀ and X₈₁ may be any amino acid. X₆₆ may also be any amino acid, however, there is a strong preference for glutamic acid. Substitution of X₆₆ with glutamine or valine may result in attenuation of binding. X₆₃, X₇₀, and X₇₄ are hydrophobic amino acids. X₆₃ is preferably leucine, isoleucine, methionine, or valine, but most preferably leucine. X₇₀ and X₇₄ are preferably valine, isoleucine, leucine, or methionine. X₇₄ is most preferably valine. X₆₄ is a polar amino acid, more preferably aspartic acid or glutamic acid, and most preferably glutamic acid. X₆₇ and X₇₅ are aromatic amino acids. Whereas tryptophan is highly preferred at X₆₇, X₇₅ is preferably tyrosine or tryptophan but most preferably tyrosine. X₇₂ and X₇₉ are cysteines that again are believed to form a loop which position amino acid may be altered by shifting the cysteines in the amino acid sequence.

[0164] D8 is most useful as an amino acid sequence having a preference for binding to IR as only a few D8 sequences capable of binding to IGF-1R over background have been detected. A preferred sequence for binding to IR is X₆₂ L X₆₄ X₆₅ X₆₆ W X₆₈ X₆₉ X₇₀ X₇₁ C X₇₃ X₇₄ X₇₅ X₇₆ X₇₇ X₇₈ C X₈₀ X₈₁ (SEQ ID NO:1578). Examples of specific peptide sequences comprising this motif include D8: KWLDQEWAWVQCEVYGRGCPSKK (SEQ ID NO:1579); and D8 minus terminal lysines: KWLDQEWAWVQCEVYGRGCPS (SEQ ID NO:1580). Preferred D8 monomer sequences include SLEEEWAQIQCEIYGRGCRY (SEQ ID NO:1581) and SLEEEWAQIQCEIWGRGCRY (SEQ ID NO:1582). Preferred D8 dimer sequences include SLEEEWAQIECEVYGRGCPS (SEQ ID NO:1583), and SLEEEWAQIECEVWGRGCPS (SEQ ID NO:1584). Nonlimiting examples of Group 2 (Formula 6; D8) amino acid sequences are shown in FIGS. 3A-3E.

[0165] 7. H X₈₂, X₈₃, X₈₄ X₈₅ X₈₆ X₈₇ X₈₈ X₈₉ X₉₀ X₉₁ X₉₂ (Formula 7) wherein X₈₂ is proline or alanine but most preferably proline; X₈₃ is a small amino acid more preferably proline, serine or threonine and most preferably proline; X₈₄ is selected from leucine, serine or threonine but most preferably leucine; X₈₅ is a polar amino acid preferably glutamic acid, serine, lysine or asparagine but more preferably serine; X₈₆ may be any amino acid but is preferably a polar amino acid such as histidine, glutamic acid, aspartic acid, or glutamine; X₈₇ is an aliphatic amino acid preferably leucine, methionine or isoleucine and most preferably leucine; amino acid X₈₈, X₈₉ and X₉₀ may be any amino acids; X₉₁ is an aliphatic amino acid with a strong preference for leucine as is X₉₂. Phenylalanine may also be used at position 92. A preferred consensus sequence of Formula 7 is H P P L S X₈₆ L X₈₈X₈₉X₉₀ L L (SEQ ID NO:1585). The Formula 7 motif binds to IR with little or no binding to IGF-1R.

[0166] 8. Another sequence is X₁₀₄ X₁₀₅ X₁₀₆ X₁₀₇ X₁₀₈ X₁₀₉ X₁₁₀ X₁₁₁ X₁₁₂ X₁₁₃ X₁₁₄ (Formula 8) which comprises eleven amino acids wherein at least one, and preferably two of the amino acids of X₁₀₆ through X₁₁₁ are tryptophan. In addition, it is also preferred that when two tryptophan amino acids are present in the sequence they are separated by three amino acids, which are preferably, in sequential order proline, threonine and tyrosine with proline being adjacent to the tryptophan at the amino terminal end. Accordingly, the most preferred sequence for X₁₀₇ X₁₀₈ X₁₀₉ X₁₁₀ X₁₁₁ is WPTYW (SEQ ID NO:1586). At least one of the three amino acids on the amino terminal (X₁₀₄, X₁₀₅ X₁₀₆) and at least one of the amino acids carboxy terminal (X₁₁₂ X₁₁₃ X₁₁₄) ends immediately flanking X₁₀₇-X₁₁₁ are preferably a cysteine residue, most preferably at X₁₀₅ and X₁₁₃ respectively. Without being bound by theory, the cysteines are preferably spaced so as to allow for the formation of a loop structure. X₁₀₄ and X₁₁₄ are both small amino acids such as, for example, alanine and glycine. Most preferably, X₁₀₄ is alanine and X₁₁₄ is glycine. X₁₀₅ may be any amino acid but is preferably valine. X₁₁₂ is preferably asparagine. Thus, the most preferred sequence is ACVWPTYWNCG (SEQ ID NO:1587).

[0167] 9. An amino acid sequence comprising JBA5: DYKDLCQSWGVRIGWLAGLCPKK (SEQ ID NO:1541); or JBA5 without terminal lysines: LCQSWGVRIGWLAGLCP (SEQ ID NO:1542) (Formula 9). The Formula 9 motif is another motif believed to form a cysteine loop that possesses agonist activity at both IR and IGF-1R. Although IR binding is not detectable by ELISA, binding of Formula 9 to IR is competed by insulin and is agonistic.

[0168] 10. W X₁₂₃ G Y X₁₂₄ W X₁₂₅ X₁₂₆ (SEQ ID NO:1543) (Formula 10; Group 6) wherein X₁₂₃ is selected from proline, glycine, serine, arginine, alanine or leucine, but more preferably proline; X₁₂₄ is any amino acid, but preferably a charged or aromatic amino acid; X₁₂₅ is a hydrophobic amino acid preferably leucine or phenylalanine, and most preferably leucine. X₁₂₆ is any amino acid, but preferably a small amino acid. In one embodiment of the present invention, the Formula 10, Group 6 motif is WPGY (SEQ ID NO: 1588). Examples of specific peptide sequences comprising this motif include E8: KVRGFQGGTVWPGYEWLRNAAKK (SEQ ID NO:1589); and E8 minus terminal lysines: KVRGFQGGTVWPGYEWLRNAA (SEQ ID NO:1590). Preferred Group 6 sequences include WAGYEWF (SEQ ID NO:1591), WEGYEWL (SEQ ID NO:1592), WAGYEWL (SEQ ID NO:1593), WEGYEWF (SEQ ID NO:1594), and DSDWAGYEWFEEQLD (SEQ ID NO:1595). Nonlimiting examples of Group 6 amino acid sequences are shown in FIGS. 4A-4B.

[0169] The IR and IGF-1R binding activities of representative Group 1 (Formula 1; A6); Group 2 (Formula 6; D8); and Group 6 (Formula 10); and Group 7 (Formula 4; F8) amino acid sequences are summarized in FIGS. 8 and 9A-9B. Group 1 (Formula 1; A6) amino acid sequences contain the consensus sequence FyxWF (SEQ ID NO:1596), which is typically agonistic in cell-based assays. Group 2 (Formula 6; D8) amino acid sequences are composed of two internal sequences having a consensus sequence VYGR (SEQ ID NO:1597) and two cysteine residues each. Thus, Group 2 peptides are capable of forming a cyclic peptide bridged with a disulfide bond. Neither of these consensus sequences have any significant linear sequence similarities greater than 2 or 3 amino acids with mature insulin. Group 7 (Formula 4; F8) amino acid sequences are composed of two internal exemplary sequences which do not have any significant sequence homology, but have two cysteine residues 13-14 residues apart, thus being capable of forming a cyclic peptide with a long loop anchored by a disulfide bridge.

[0170] Amino and Carboxyl Terminal Extensions Modulate Activity of Motifs

[0171] In addition to the motifs stated above, the invention also provides preferred sequences at the amino terminal or carboxyl terminal ends which are capable of enhancing binding of the motifs to either IR, IGF-1R, or both. In addition, the use of the extensions described below does not preclude the possible use of the motifs with other substitutions, additions or deletions that allow for binding to IR, IGF-1R, or both.

[0172] Formula 1

[0173] Any amino acid sequence may be used for extensions of the amino terminal end of A6, although certain amino acids in amino terminal extensions may be identified which modulate activity. Preferred carboxy terminal extensions for A6 are A6 X₉₃ X₉₄ X₉₅ X₉₆ X₉₇ wherein X₉₃ may be any amino acid, but is preferably selected from the group consisting of alanine, valine, aspartic acid, glutamic acid, and arginine, and X₉₄ and X₉₇ are any amino acid; X₉₅ is preferably glutamine, glutamic acid, alanine or lysine but most preferably glutamine. The presence of glutamic acid at X₉₅ however may confer some IR selectivity. Further, the failure to obtain sequences having an asparagine or aspartic acid at position X₉₅ may indicate that these amino acids should be avoided to maintain or enhance sufficient binding to IR and IGF-1R. X₉₆ is preferably a hydrophobic or aliphatic amino acid, more preferably leucine, isoleucine, valine, or tryptophan but most preferably leucine. Hydrophobic residues, especially tryptophan at X₉₆ may be used to enhance IR selectivity.

[0174] Formula 2

[0175] B6 with amino terminal and carboxy terminal extensions may be represented as X₉₈ X₉₉ B6 X₁₀₀. X₉₈ is optionally aspartic acid and X₉₉ is independently an amino acid selected from the group consisting of glycine, glutamine, and proline. The presence of an aspartic acid at X₉₈ and a proline at X₉₉ is associated with an enhancement of binding for both IR and IGF-1R. A hydrophobic amino acid is preferred for the amino acid at X₁₀₀, an aliphatic amino acid is more preferred. Most preferably leucine, for IR and valine for IGF-1R. Negatively charged amino acids are preferred at both the amino and carboxy terminals of Formula 2A.

[0176] Formula 3

[0177] An amino terminal extension of Formula 3 defined as X₁₀₁ X₁₀₂ X₁₀₃ revB6 wherein X₁₀₃ is a hydrophobic amino acid, preferably leucine, isoleucine or valine, and X₁₀₂ and X₁₀₁ are preferably polar amino acids, more preferably aspartic acid or glutamic acid may be useful for enhancing binding to IR and IGF-1R. No preference is apparent for the amino acids at the carboxy terminal end of Formula 3.

[0178] Formula 10

[0179] In one preferred embodiment, Formula 10 sequences W X₁₂₃ G Y X₁₂₄ W X₁₂₅ X₁₂₆ (SEQ ID NO:1543) can include an amino terminal extension comprising the sequence DSD and/or a carboxy terminal extension comprising the sequence EQLD (SEQ ID NO:1598).

[0180] IR Binding Preferences

[0181] As indicated above, the amino acid sequences containing the motifs of this invention may be constructed to have enhanced selectivity for either IR or IGF-1R by choosing appropriate amino acids at specific positions of the motifs or the regions flanking them. By providing amino acid preferences for IR or IGF-1R, this invention provides the means for constructing amino acid sequences with minimized activity at the non-cognate receptor. For example, the amino acid sequences disclosed herein with high affinity and activity for IR and low affinity and activity for IGF-1R are desirable as IR agonist as their propensity to promote undesirable cell proliferation, an activity of IGF-1 agonists, is reduced. Ratios of IR binding affinity to IGF-1R binding affinity for specific sequences are provided in FIGS. 1A-1O; 2A-2E; 3A-3E; 4A-4I; 44A-44B. As an insulin therapeutic, the IR/IGF-1R binding affinity ratio is preferably greater than 100. Conversely, for use as an IGF-1R therapeutic, the IR/IGF-1R ratio should be less than 0.01. Examples of peptides that selectively bind to IGF-1R are shown below.

TABLE 1
IGF-IR-SELECTIVE SEQUENCES

| | |
|---|---|
| SEQ | +HL,14 |

| | ID | | Ratios over Background | | | Comparisons | |
|---|---|---|---|---|---|---|---|
| Clone | NO: | Sequence | E-Tag | IGF-1R | IR | IGF-1R/IR | IR/IGF-1R |

FORMULA I (Group I; A6-like):

| | | | | | | | |
|---|---|---|---|---|---|---|---|
| A6L-0-E6-IR | 1599 | YRGMLVLGRSSDGAGKVAFERPARIGQTVFAVN [symbol] | 31.0 | 31.0 | 1.8 | 17.0 | 0.1 |
| H2CA-4-G9-IGFR | 1600 | GIISQSCPESFYDWFAGQVSDPWWCW | 8.6 | 9.5 | 0.6 | 16.0 | 0.1 |
| H2CA-4-H6-IGFR | 1601 | VGRASGFPENFYDWFGRQLSLQSGEQ | 4.9 | 10.5 | 0.7 | 14.6 | 0.1 |
| A6L-0-E4-IR | 1602 | YRGMLVLGRISDGAG#VASEPPARIGRKVFAVN [symbol] | 26.0 | 16.0 | 1.3 | 13.0 | 0.1 |
| A6L-0-H3-IR | 1603 | YRGMLVLGRISGGAGKAASERPARIGQKVSAVN [symbol] | 27.0 | 26.0 | 2.0 | 13.0 | 0.1 |
| H2CA-4-F5-IGFR | 1604 | VGYQGQGDENFYDWFIRQVSGRLGVQ | 5.5 | 9.7 | 0.8 | 12.3 | 0.1 |
| H2CA-4-H8-IGFR | 1605 | SACQFDCHENFYDWFARQVSGGAAYG | 5.6 | 9.2 | 1.0 | 9.4 | 0.1 |
| H2CA-4-F11-IGFR | 1606 | SAAQLFFQESFYDWFLRQVAESSQPN | 3.5 | 6.8 | 1.0 | 6.7 | 0.1 |
| H2CA-4-F6-IGFR | 1607 | AVRATRFDEAFYDWFVRQISDGQGNK | 3.9 | 7.3 | 1.1 | 6.4 | 0.2 |
| H2CA-4-F10-IGFR | 1608 | VNQSGSIHENFYDWFERQVSHQRGVR | 4.9 | 5.7 | 1.0 | 5.9 | 0.2 |
| H2CA-1-A3-IGFR | 1609 | APDPSDFQEIFYDWFVRQVSRMPGGG | 7.7 | 3.8 | 0.8 | 5.1 | 0.2 |
| H2CA-3-C8-IGFR | 1610 | SSCDGAGHESFYEWFVRQVSGCRSV | 15.1 | 5.6 | 1.2 | 4.8 | 0.2 |
| H2CA-2-B9-IGFR | 1611 | RAGSSDFHEDFYEWFVRQVSLSLKGK | 9.3 | 7.0 | 1.7 | 4.2 | 0.2 |
| H2CA-4-H4-IGFR | 1612 | QAVQPGFHEEFYDWFVRQVSTGVGGG | 3.9 | 4.1 | 1.0 | 4.2 | 0.2 |
| E4Dα-4-H2-IR | 1613 | GFREGNFYEWFQAQVT | 37.8 | 33.9 | 8.2 | 4.1 | 0.2 |
| H2CA-4-F7-IGFR | 1614 | SSIGGGFHENFYDWFSRQLSQSPPLK | 1.5 | 3.2 | 0.8 | 4.1 | 0.2 |
| H2CA-3-D6-IGFR | 1615 | QSPVGSSHEDFYDWFFRQVAQSGAHQ | 8.3 | 9.0 | 2.2 | 4.0 | 0.3 |
| H2CA-3-D8-IGFR | 1616 | NYRRQVFNGNFYDWFDRQVFSLVTPG | 10.9 | 7.2 | 1.8 | 4.0 | 0.3 |
| H2CA-4-G11-IGFR | 1617 | TLDGGSFEEQFYDWFVRQLSYRTNPD | 10.8 | 9.5 | 2.5 | 3.9 | 0.3 |
| H2CA-4-F1-IGFR | 1618 | FYVQQWGHENFYDWFDRQVSQSGGAG | 5.8 | 3.5 | 0.9 | 3.8 | 0.3 |
| H2CA-3-D7-IGFR | 1619 | LRRQAPVEENFYDWFVRQVSGDRVGG | 13.3 | 3.0 | 0.8 | 3.7 | 0.3 |
| H2CA-1-A7-IGFR | 1620 | RCGRELYHSTFYDWFDRQVAGRTCPS | 8.0 | 2.2 | 0.6 | 3.7 | 0.3 |
| H2CA-2-B4-IGFR | 1621 | CCLLCRFQQNFYDWFVCQGISRLRPL | 3.5 | 4.1 | 1.1 | 3.6 | 0.3 |
| H2CA-2-B3-IGFR | 1622 | PPLASDLDVQFYGWFVQQVSPPGRGG | 7.7 | 3.8 | 1.0 | 3.6 | 0.3 |
| H2CA-2-B2-IGFR | 1623 | GAPVDQLHEDFYDWFVRQVSQAATG | 4.1 | 3.4 | 1.0 | 3.5 | 0.3 |
| E4Dα-2-D11-IR | 1624 | GFREGSFYDWFQAQVT | 40.2 | 11.1 | 3.3 | 3.4 | 0.3 |
| 20E2Bβ-4-G6-IR | 1625 | SQAGSAFYAWFDQVLRTVHSA | 22.4 | 6.2 | 1.9 | 3.3 | 0.3 |
| H2CA-4-H9-IGFR | 1626 | RGAVAGFHDQFYDWFDRQVSRVHKFG | 8.7 | 5.6 | 1.9 | 3.0 | 0.3 |
| H2CA-2-B11-IGFR | 1627 | AICDAGFHEHFYDWFALQVSDCGRQS | 11.9 | 4.6 | 1.6 | 3.0 | 0.3 |
| H2CA-3-E8-IGFR | 1628 | LGYQEPFQQNFYDWFVRQVSGAENAG | 13.2 | 6.3 | 2.2 | 2.9 | 0.3 |
| A6S-2-D11-IR | 1629 | EAASLGSQDRNFYDWFVRQVV | 48.4 | 37.4 | 13.5 | 2.8 | 0.4 |
| A6S-2-D1-IR | 1630 | VERSASSQDGNEYDWFWQIR | 37.8 | 30.6 | 12.0 | 2.6 | 0.4 |
| A6S-3-E2-IR | 1631 | TSEVQRRSQDNFYDWFVAQVA | 33.1 | 24.7 | 9.8 | 2.5 | 0.4 |
| H2CA-3-E11-IGFR | 1632 | HLADGQFHEKFYDWFERQISSRCNDC | 4.7 | 2.2 | 1.0 | 2.2 | 0.5 |
| H2CA-3-C11-IGFR | 1633 | FRTLAAQHDSFYDWFDRQVSGAAGER | 9.3 | 3.3 | 1.6 | 2.1 | 0.5 |
| A6-PD1-IGFR | 1634 | SFHEDFYDWFDRQVSGSLKK | | | | | |
| H2C-PD1-IGFR(R | 1558 | GSLDESFYDWFERQLGKK | | | | | |

FORMULA 2 (Group 2; B6-like):

| | | | | | | | |
|---|---|---|---|---|---|---|---|
| 20C-3-G3-IGFR | 1635 | TFYSCLASLLTGTPQPNRGPWERCR | 33.1 | 32.3 | 1.2 | 27.0 | <0.1 |
| 20C-4-C7-IGFR | 1636 | FFYDCLAALLQGVARYHDLCAVEIT | 35.3 | 28.0 | 1.3 | 21.8 | <0.1 |
| B6Hα-1-B5-IR | 1637 | CCTTEMVVMDARDDPFYHKLSELVTGG | 41.5 | 20.5 | 1.0 | 20.5 | 0.0 |
| R20β-4-A6-IR | 1638 | RGQSDAFYSGLWALIGLSDG | 9.3 | 25.9 | 1.5 | 17.3 | 0.1 |
| 20E2B-1-A6-IGFR | 1639 | GVRAMSFYDALVSVLGLGPSG | 18.6 | 18.1 | 1.1 | 16.8 | 0.1 |
| R20α-4-20A12-IR | 1640 | RLFYCGIQALGANLGYSGCV | 48.6 | 39.9 | 2.4 | 16.6 | 0.1 |
| 20E2Bβ-4-G7-IR | 1641 | LQPCSGFYECIERLIGVKLSG | 19.9 | 25.2 | 1.6 | 15.8 | 0.1 |
| NNRPγ-4-B11-IR | 1642 | LKDGFYDYFWQRLHLGS | 4.1 | 18.7 | 1.2 | 15.5 | 0.1 |
| 20E2B-3-C6-IGFR | 1643 | VEGRGLFYDLLRQLLARRQNG | 17.9 | 16.8 | 1.1 | 14.8 | 0.1 |
| B6Hα-1-A2-IR | 1644 | RGCNDDGGKGWSDDPFYHKLSELICGG | 22.3 | 14.6 | 1.0 | 14.6 | 0.1 |
| 20E2A-4-F11-IGFR | 1645 | QGGSASFYDAIDRLLRMRIGG | 21.3 | 18.8 | 1.3 | 14.6 | 0.1 |
| B6Hα-3-E9-IR | 1646 | RCEEKQAEVGPSSDPFYHKMSELLGCR | 44.6 | 24.2 | 1.7 | 14.2 | 0.1 |
| 20C-3-F6-IGFR | 1647 | DRDFCRFYERLTALVGGQVDGGWPC | 33.5 | 26.1 | 1.9 | 14.1 | 0.1 |
| 20E2B-4-H3-IGFR | 1648 | KLHNLMFYYGLQRLVWGAGLG | 11.2 | 14.8 | 1.1 | 13.9 | 0.1 |
| 20E2B-3-02-IGFR | 1649 | GNGDGMFYQLLSLLVGRDMHV | 13.1 | 8.9 | 0.6 | 13.8 | 0.1 |
| 20C-3-A1-IGFR | 1650 | SSYGCDGFYLMLFSLGLVASQELEC | 26.5 | 20.8 | 1.5 | 13.7 | 0.1 |
| 20E2B-3-E3-IGFR | 1651 | PDLHKGFYAQLAQLIRGQLLS | 22.4 | 16.3 | 1.3 | 13.1 | 0.1 |
| R20α-3-20E2-IR | 1652 | FYDAIDQLVRGSARAGGTRD | 46.3 | 39.9 | 3.1 | 12.9 | 0.1 |
| 20E2B-4-H12-IGFR | 1653 | YSCGDGFYSLLSDLLGGQFRC | 6.5 | 9.7 | 0.8 | 12.8 | 0.1 |
| B6Hα-3-F11-IR | 1654 | RGMKEEVLVGGSTDPFYHKLSELLQGS | 49.5 | 18.7 | 1.6 | 11.7 | 0.1 |
| 20E2B-3-D2-IGFR | 1655 | IQQELTFYDLLHRLVRSELGS | 20.7 | 12.4 | 1.1 | 11.7 | 0.1 |
| 20E2B-3-D8-IGFR | 1656 | GGTEVDFYRALERLVRGQLGL | 20.4 | 17.7 | 1.6 | 11.3 | 0.1 |
| 20E2B-3-E8-IGFR | 1657 | LRIANLFYQRLWDLAFGGGG | 15.7 | 16.7 | 1.5 | 11.1 | 0.1 |
| B6Hα-2-C4-IR | 1658 | RCGRW*AEMGAGDDPFYHKLSELVCG | 20.7 | 9.9 | 0.9 | 11.0 | 0.1 |
| R20α-4-20C11-IR | 1659 | DRAFYNGLRDLVGAVYGAWD | 43.7 | 30.8 | 3.0 | 10.3 | 0.1 |
| 20E2B-4-F8-IGFR | 1660 | PVGVQGFYEGLSRLVLGRGGW | 12.3 | 7.3 | 0.8 | 9.7 | 0.1 |
| 20E2B-1-A11-IGFR | 1661 | RFSTDGFYQYLLALVGGGPVG | 15.0 | 9.5 | 1.0 | 9.7 | 0.1 |
| 20E2B-3-D4-IGFR | 1662 | NSRDGGFYLQLERLLGFPVTG | 8.1 | 7.9 | 0.8 | 9.6 | 0.1 |
| 20E2B-2-B11-IGFR | 1663 | VVTPVNFYRALEALVRG.RLG | 13.9 | 10.6 | 1.1 | 9.4 | 0.1 |
| 20E2B-3-C8-IGFR | 1664 | QPAPDGFYSALMKLIGRGGVS | 18.5 | 15.6 | 1.8 | 8.9 | 0.1 |
| 20E2B-2-B2-IGFR | 1665 | PGTDLGFYQALRCVVIQGACD | 11.7 | 4.9 | 0.6 | 8.1 | 0.1 |
| 20E2B-4-F10-IGFR | 1666 | AQPCGGFYGLLEQLVGRSVCD | 19.0 | 17.3 | 2.2 | 7.8 | 0.1 |
| 20E2B-4-F9-IGFR | 1667 | QPDHSYFYSLLQELVGSEERL | 11.9 | 14.7 | 1.9 | 7.7 | 0.1 |
| 20C-3-A4-IGFR | 1668 | QFYGCLLDLSLGVPSFGWRRRCITA | 17.7 | 8.8 | 1.2 | 7.6 | 0.1 |
| 20E2B-3-D11-IGFR | 1669 | LGVTDGFYAALGYLIHGVGQF | 14.3 | 12.2 | 1.6 | 7.6 | 0.1 |
| 20E2B-3-C11-IGFR | 1670 | CMM.DGFYAGLGCLLTAGEGR | 15.3 | 15.4 | 2.1 | 7.5 | 0.1 |
| 20E2B-2-B3-IGFR | 1671 | ICTGQGFYQVLCGLLRGTSAR | 9.1 | 5.3 | 0.7 | 7.4 | 0.1 |
| 20E2B-3-D12-IGFR | 1672 | QGNVLDFYGWIGRLLAKQGSD | 10.3 | 6.2 | 0.9 | 7.3 | 0.1 |
| 20E2B-3-E12-IGFR | 1673 | VATSQGFYSGLSELLQGGGNV | 13.9 | 6.0 | 0.8 | 7.3 | 0.1 |
| 20E2B-2-B8-IGFR | 1674 | IWATGDFYRLLSQLVMGRVGT | 17.4 | 5.7 | 0.8 | 7.2 | 0.1 |
| NNRPγ-4-A9-IR | 1675 | EGSGFYGYFFSLLGLQG | 3.0 | 10.0 | 1.4 | 7.1 | 0.1 |
| 20E2B-4-G11-IGFR | 1676 | RQGTGSFYLMLEQLLVGARGP | 8.9 | 4.5 | 0.6 | 7.0 | 0.1 |
| 20E2B-3-D6-IGFR | 1677 | DSVGDNFYQLLESLVGGHGVG | 20.7 | 17.8 | 2.6 | 6.9 | 0.1 |
| B6Hα-2-C7-IR | 1678 | RGIVAMVEATEVGSDHDPFYHKLSELVQGS | 45.1 | 6.7 | 1.0 | 6.7 | 0.1 |
| 20E2B-2-B7-IGFR | 1679 | LSSDGQFYRALNLLLQGSAGR | 18.0 | 6.1 | 0.9 | 6.7 | 0.1 |
| 20E2B-3-C4-IGFR | 1680 | ASSASGFYELLQRLAGLGLEV | 23.4 | 20.4 | 3.3 | 6.2 | 0.2 |
| 20C-3-E4-IGFR | 1681 | FFYRCLSRLLGGQLGSRLGLSCIGD | 37.7 | 7.7 | 1.3 | 6.0 | 0.2 |
| NNRPγ-4-A1-IR | 1682 | IIGGFYSYFNSVLRLGT | 9.7 | 10.9 | 1.8 | 6.0 | 0.2 |
| 20E2B-4-H8-IGFR | 1683 | PAGPCGFYCGLGLLLHGDQSP | 7.2 | 5.3 | 0.9 | 5.9 | 0.2 |
| 20E2B-4-H9-IGFR | 1684 | RCQGTGFYTCIQELIGFGDPD | 4.5 | 5.2 | 0.9 | 5.6 | 0.2 |
| B6Hα-2-C10-IR | 1685 | SGAKVIWTGDSGDPFYHKLSELLQGS | 46.9 | 5.8 | 1.1 | 5.3 | 0.2 |
| 20E2A-3-C7-IGFR | 1686 | VGTVAGFYDAIAQLVARASRV | 17.6 | 5.4 | 1.1 | 5.1 | 0.2 |
| 20E2B-1-A8-IGFR | 1687 | TLRSPTFYDWLEMVLTHGQGG | 16.1 | 4.4 | 0.9 | 5.0 | 0.2 |
| NNRPγ-4-A7-IR | 1688 | RFDPFYSYFVNLLGASA | 2.5 | 6.3 | 1.3 | 4.9 | 0.2 |
| B6Hα-3-E8-IR | 1689 | RGKTAAVIVGRPADPFYHKLSELLQGG | 47.6 | 5.3 | 1.1 | 4.8 | 0.2 |
| B6Hα-3-F10-IR | 1690 | GCVVEWQKWHGASDPFYHKLSELGGCS | 47.2 | 8.8 | 1.9 | 4.6 | 0.2 |
| B6Hα-2-D6-IR | 1691 | GRTMAVMAAGGPDDPFYHKLSELVQGG | 33.5 | 4.4 | 1.0 | 4.4 | 0.2 |
| B6Hα-3-E7-IR | 1692 | GCAVVEEAERSRGDPFYHKLSELIQGC | 47.0 | 5.6 | 1.3 | 4.3 | 0.2 |
| B6Hα-2-D1-IR | 1693 | GCEVIVEEGDSADPFYHKLSELCQGS | 11.7 | 5.4 | 1.3 | 4.2 | 0.2 |
| 20E2A-3-D10-IGFR | 1694 | MMVVDGFYDALHQLVVAQSLG | 20.6 | 6.9 | 1.8 | 3.9 | 0.3 |
| 20E2A-3-A12-IGFR | 1695 | LSVALSFYDALGQLVAGEGRW | 16.1 | 4.3 | 1.1 | 3.9 | 0.3 |
| B6Hα-4-G8-IR | 1696 | GGTKAVAKVGTRDDPFYHKLSELLQGS | 32.3 | 6.1 | 1.7 | 3.6 | 0.3 |
| B6L-4-D7-IR | 1697 | AETSVQVGWIRLQSVWPGEHWNTVDPFY | 14.3 | 4.8 | 1.4 | 3.4 | 0.3 |
| | | HKLSELLRGSGA | | | | | |
| B6Hα-1-A3-IR | 1698 | SRAKVEAEMPDSGDPFYHKLSELLASG | 37.4 | 2.6 | 0.8 | 3.3 | 0.3 |
| B6Hα-3-F7-IR | 1699 | SRVAATKEKRPSDDPFYHKLSELLQGS | 41.5 | 3.1 | 1.0 | 3.1 | 0.3 |
| B6Hα-2-D8-IR | 1700 | SSETAKMVTGTRDDPFYHKLSELVQGS | 19.3 | 3.0 | 1.0 | 3.0 | 0.3 |
| B6Hα-1-B3-IR | 1701 | GCITAENGAGDPFYHKLSELGGCS | 33.1 | 3.2 | 1.1 | 2.9 | 0.3 |
| B6Hα-3-E5-IR | 1702 | RCGDEEGWQENRRDDPFYHKLSELFGGC | 28.8 | 2.9 | 1.0 | 2.9 | 0.3 |
| 20E2A-4-G11-IGFR | 1703 | MNVFVSFYDAIDQLVCQRIGC | 20.7 | 3.3 | 1.3 | 2.6 | 0.4 |
| 20E2Bβ-3-C7-IR | 1704 | QSGSGDFYDWLSRLIRGNGDG | 1.5 | 3.1 | 1.5 | 2.0 | 0.5 |
| B6Hα-3-E6-IR | 1705 | CGAKMTGTPNDPFYHKLSELLQRG | 18.2 | 2.3 | 1.2 | 1.9 | 0.5 |
| 20E2A-3-A3-IGFR | 1706 | GHYFGSFYDAIDQLVAGMLPG | 5.2 | 3.0 | 1.5 | 1.9 | 0.5 |
| B6L-4-A7-IR | 1707 | AGTPAQVG*NRLWSVWPGEHWNTVDPFY | 11.6 | 3.4 | 1.9 | 1.8 | 0.6 |
| | | NKLSELLRESGA | | | | | |
| B6Hα-3-F1-IR | 1708 | CSMAAVAEAGDDDDPFYHKLSELCQGS | 22.5 | 2.4 | 1.3 | 1.8 | 0.5 |
| B6L-3-G6-IR | 1709 | VDTPAQVGWNRLWSVGPGEHWYTDDPFY | 7.6 | 2.5 | 1.8 | 1.4 | 0.7 |
| | | H*LSELLRESGA | | | | | |
| B6L-3-G5-IR | 1710 | AETSAQVGWQRLWSVWPGDHWSTLDPFY | 11.5 | 2.0 | 1.4 | 1.4 | 0.7 |
| | | HKLSELLRESGA | | | | | |
| 20E2A-3-A4-IGFR | 1711 | AGSVTSFYDAMEQLVATGTSA | 16.8 | 2.5 | 1.8 | 1.4 | 0.7 |
| B6-PD1-IGFR | 1712 | TDDGFYDALEQLVQGSKK | | | | | |
| 20E2-PD1-IGFR | 1713 | GSFYEALQRLVGGEQGKK | | | | | |
| (RP10) | | | | | | | |

FORMULA 10 (Group 6):

| | | | | | | | |
|---|---|---|---|---|---|---|---|
| R20β-4-E8-IR | 1714 | VRGFQGGTVWPGYEWLRNAA | 41.0 | 34.9 | 3.6 | 9.7 | 0.1 |
| 40F-4-D1-IGFR | 1715 | LSCLAYSRHGIWRPSTDLGLGRSVGEGSVS | 4.9 | 4.6 | 0.3 | 13.1 | 0.1 |
| | | TRWRGYDWFE | | | | | |
| 40F-4-B1-IGFR | 1716 | GLDHSDAVGVHLGFAWPAQARGRWEAGGLE | 4.1 | 3.0 | 0.2 | 13.1 | 0.1 |
| | | DTWAGYDWL | | | | | |
| 40F-4-D10-IGFR | 1717 | W.GYAWLS | 4.9 | 4.5 | 0.4 | 11.7 | 0.1 |

[0182] Besides relative binding at IR or IGF-1R, relative efficacy at the cognate receptor is another important consideration for choosing a potential therapeutic. Thus, a sequence that is efficacious at IR but has little or no significant activity at IGF-1R may also be considered as an important IR therapeutic, irrespective of the relative binding affinities at IR and IGF-1R. For example, A6 selectivity for IR may be enhanced by including glutamic acid in a carboxyl terminal extension at position X₉₅. IR selectivity of the B6 motif may be enhanced by having a tryptophan or phenylalanine at X₁₁. Tryptophan at X₁₃ also favors selectivity of IR. A tryptophan amino acid at X₁₃ rather than leucine at that position also may be used to enhance selectivity for IR. In the reverse B6 motif, a large amino acid at X₁₅ favors IR selectivity. Conversely, small amino acids may confer specificity for IGF-1R. In the F8 motif, an L in position X₂₃ is essentially required for IR binding. In addition, tryptophan at X₃₁ is also highly preferred. At X₃₂, glycine is preferred for IR selectivity.

[0183] Multiple Binding Sites on IR and IGF-1R

[0184] The competition data disclosed herein reveals that at least two separate binding sites are present on IR and IGF-1R which recognize the different sequence motifs provided by this invention.

[0185] As shown in FIG. 6, competition data indicate that peptides comprising the A6 motifs compete for binding to the same site on IR (Site 1) whereas the D8 motifs compete for a second site (Site 2). The identification of peptides that bind to separate binding sites on IR and IGF-1R provides for various schemes of binding to IR or IGF-1R to increase or decrease its activity. Examples of such schemes for IR are illustrated in FIG. 7.

[0186] The table below shows sequences based on their groups, which bind to Site 1 or Site 2.

TABLE 2

| | | |
|---|---|---|
| | | SEQ |
| | | ID |
| Clone | Sequence | NO: |

REPRESENTATIVE SITE 1 PEPTIDES

A6-like (FYxWF) (SEQ ID NO: 1596):

| | | |
|---|---|---|
| G3 | KRGGGTFYEWFESALRKHGAGKK | 1718 |
| H2 | VTFTSAVFHENFYDWFVRQVSKK | 1719 |
| H2C | FHENFYDWFVRQVSKK | 1556 |
| A6S-IR3-E12 | GRVDWLQRNANFYDWFVAELG | 1560 |
| A6S-IR4-G1 | NGVERAGTGDNFYDWFVAQLH | 1720 |
| H2CB-R3-B12 | QSDSGTVHDRFYGWFRDTWAS | 1721 |
| 20E2A-R3-B11 | GRFYGWFQDAIDQLMPWGFDP | 1722 |
| rB6-F6 | RYGRWGLAQQFYDWFDR | 1723 |
| E4D□-1-B8-IR˜ | GFREGQRWYWFVAQVT | 1724 |
| H2CA-4-F11-IR | TYKARFLHENFYDWFNRQVSQYFGRV | 1725 |
| H2CB-R3-D2 | WTDVDGFHSGFYRWFQNQWER | 1726 |
| H2CB-R3-D12 | VASGHVLHGQFYRWFVDQFAL | 1727 |
| H2CB-R4-H5 | QARVGNVHQQFYEWFREVMQG | 1728 |
| H2C-B-E8* | TGHRLGLDEQFYWWFRDALSG | 1729 |
| H2CB-3-B6-IR˜ | VGDFCVSHDCFYGWFLRESMQ | 1730 |
| A6S-IR2-C1 | RMYFSTGAPQNFYDWFVQEWD | 1731 |

B6-like (FYxxLxxL) (SEQ ID NO: 1732):

| | | |
|---|---|---|
| 20C11 | KDRAFYNGLRDLVGAVYGAWDKK | 1733 |
| 20E2 | DYKDFYDAIDQLVRGSARAGGTRDKK | 1734 |
| B62-R3-C7 | EHWNTVDPFYFTLFEWLRESG | 1735 |
| B62-R3-C10 | EHWNTVDPFYQYFSELLRESG | 1736 |
| 20E2B-3-B3-IR | AGVNAGFYRYFSTLLDWWDQG | 1737 |
| 20E2-B-E3* | IQGWEPFYGWFDDWAQMFEE | 1738 |
| 20E2A-R4-F9 | PPWGARFYDAIEQLVFDNLCC | 1739 |
| RPNN-4-G6-HOLO* | RWPNFYGYFESLLTHFS | 1740 |
| RPNN-4-F3-HOLO* | HYNAFYEYFQVLLAETW | 1741 |
| 20E2A-R4-E2 | IGRVRSFYDAIDKLFQSDWER | 1742 |
| RPNN-2-C1-IR* | EGWDFYSYFSGLLASVT | 1743 |
| 20E2B-4-F12-IR | SVKEVQFYRYFYDLLQSEESG | 1744 |
| 20E2-B-E12 | GNSGGSFYRYFQLLLDSDGMS | 1745 |
| 20E2A-R3-B6 | RDAGSSFYDAIDQLVCLTYFC | 1746 |

Reverse B6-like (LxxLxxYF) (SEQ ID NO: 1747):

| | | |
|---|---|---|
| rB6-A12 | LDALDRLMRYFEERPSL | 1748 |
| rB6-F9 | PLAELWAYFEHSEQGRSSAH | 1749 |
| rB6-4-E7-IR | LDPLDALLQYFWSVPGH | 1750 |
| rB6-4-F9-IR | RGRLGSLSTQFYNWFAE | 1751 |
| rB6-E6 | ADELEWLLDYFMHQPRP | 1752 |
| rB6-4-F12-IR | DGVLEELFSYFSATVGP | 1753 |

Group 6 (WPxYxWL) (SEQ ID NO: 1754):

| | | |
|---|---|---|
| R20□-4-A4-IR | WPGYLFFEEALQDWRGSTED | 1755 |

Peptides by design**:

| | | |
|---|---|---|
| H2C-PD1-IR˜ | AAVHEQFYDWFADQYKK | 1756 |
| A6W-PD1-1R˜ | QAPSNFYDWFVREWDKK | 1757 |
| 20E2-PD1-IR˜ | QSFYDYIEELLGGEWKK | 1758 |
| B6C-PD1-IR˜ | DPFYQGLWEWLRESGKK | 1759 |

REPRESENTATIVE SITE 2 PEPTIDES (C-C LOOPS)

F8-derived (Long C-C loop):

| | | |
|---|---|---|
| F8 | HLCVLEELFWGASLFGYCSG | 1760 |
| F8-C12 | FQSLLEELVWGAPLFRYGTG | 1761 |
| F8-Des2 | PLCVLEELFWGASLFGYCSG | 1762 |
| F8-F12 | PLCVLEELFWGASLFGQCSG | 1763 |
| F8-B9 | HLCVLEELFWGASLFGQCSG | 1764 |
| F8-B12 | DLRVLCELFGGAYVLGYCSE | 1765 |
| NNKH-2B3 | HRSVLKQLSWGASLFGQWAG | 1766 |
| NNKH-2F9˜ | HLSVGEELSWWVALLGQWAR | 1767 |
| NNKH-4H4˜ | APVSTEELRWGALLFGQWAG | 1768 |

D8-derived (Small C-C loop):

| | | |
|---|---|---|
| D8 | KWLDQEWAWVQCEVYGRGCPSKK | 1769 |
| D8-G1 | QLEEEWAGVQCEVYGRECPS | 1770 |
| D8-B5˜ | ALEEEWAWVQVRSIRSGLPL | 1771 |
| D8-A7 | SLDQEWAWVQCEVYGRGCLS | 1772 |
| D8-F1˜ | WLEHEWAQIQCELYGRGCTY | 1773 |

Midi C-C loop:

| | | |
|---|---|---|
| D8-F10 | GLEQGCPWVGLEVQCRGCPS | 1774 |
| F8-B12˜ | DLRVLCELFGGAYVLGYCSE | 1775 |
| F8-A9 | PLWGLCELFGGASLFGYCSS | 1776 |

**Based on analysis of entire panning data, amino acid preferences at each position were calculated to define these “idealized” peptides;
*Peptides synthesized and currently being purified; ˜ Peptides planned.

[0187] In various aspects of the present invention, amino acid sequences comprising Site 1 motifs may bind to Site 1 of IR or Site 1 of IGF-1R. Similarly, amino acids sequences comprising Site 2 motifs may bind to Site 2 of IR or Site 2 of IGF-1R. However, specific peptides may show higher binding affinity for IR than for IGF-1R, while other peptides may show higher binding affinity for IGF-1R than for IR. In addition, Site 1 and Site 2 on IR do not “crosstalk”, i.e., Site 1-binding sequences do not compete with Site 2-binding sequences at IR. In contrast, Site 1 and Site 2 on IGF-1R do show some crosstalk, suggesting an allosteric effect. These aspects are illustrated in the Examples described hereinbelow.

[0188] Multivalent Ligands

[0189] This invention provides ligands that preferentially bind different sites on IR and IGF-1R. The A6 amino acid sequence motif confers binding to IR at Site 1 (FIG. 6). The D8 amino acid sequence motif confers binding to IR at Site 2 (FIG. 6). Accordingly, multimeric ligands may be prepared according to the invention by covalently linking amino acid sequences. Depending on the purpose intended for the multivalent ligand, amino acid sequences that bind the same or different sites may be combined to form a single molecule. Where the multivalent ligand is constructed to bind to the same corresponding site on different receptors, or different subunits of a receptor, the amino acid sequences of the ligand for binding to the receptors may be the same or different, provided that if different amino acid sequences are used, they both bind to the same site.

[0190] Multivalent ligands may be prepared by either expressing amino acid sequences which bind to the individual sites separately and then covalently linking them together, or by expressing the multivalent ligand as a single amino acid sequence which comprises within it the combination of specific amino acid sequences for binding.

[0191] Various combinations of amino acid sequences may be combined to produce multivalent ligands having specific desirable properties. Thus, agonists may be combined with agonists, antagonists combined with antagonists, and agonists combined with antagonists. Combining amino acid sequences that bind to the same site to form a multivalent ligand may be useful to produce molecules that are capable of cross-linking together multiple receptor units. Multivalent ligands may also be constructed to combine amino acid sequences which bind to different sites (FIG. 7).

[0192] In view of the discovery disclosed herein of monomers having agonist properties at IR or IGF-1R, preparation of multivalent ligands may be useful to prepare ligands having more desirable pharmacokinetic properties due to the presence of multiple bind sites on a single molecule. In addition, combining amino acid sequences that bind to different sites with different affinities provides a means for modulating the overall potency and affinity of the ligand for IR or IGF-1R.

[0193] Construction of Hybrids

[0194] In one embodiment, hybrids of at least two peptides (e.g., dimer peptides) may be produced as recombinant fusion polypeptides, which are expressed in any suitable expression system. The polypeptides may bind the receptor as either fusion constructs containing amino acid sequences besides the ligand binding sequences or as cleaved proteins from which signal sequences or other sequences unrelated to ligand binding are removed. Sequences for facilitating purification of the fusion protein may also be expressed as part of the construct. Such sequences optionally may be subsequently removed to produce the mature binding ligand. Recombinant expression also provides means for producing large quantities of ligand. In addition, recombinant expression may be used to express different combinations of amino acid sequences and to vary the orientation of their combination, i.e., amino to carboxyl terminal orientation.

[0195] In one embodiment shown below (FIG. 28), MBP-FLAG®-PEPTIDE-(GGS)ₙ (SEQ ID NO: 1777)-PEPTIDE-E-TAG, a fusion construct producing a peptide dimer comprises a maltose binding protein amino acid sequence (MBP) or similar sequence useful for enabling the affinity chromatography purification of the expressed peptide sequences. This purification facilitating sequence may then be attached to a FLAG® sequence to provide a cleavage site to remove the initial sequence. The dimer then follows which includes the intervening linker and a tag sequence may be included at the carboxyl terminal portion to facilitate identification/purification of the expression of peptide. In the representative construct illustrated above, G and S are glycine and serine residues, which make up the linker sequence. As non-limiting examples, n can be 1, 2, 3, or 4 to yield a linker sequence of 3, 6, 9, and 12 amino acids, respectively.

[0196] In addition to producing the dimer peptides by recombinant protein expression, dimer peptides may also be produced by peptide synthesis whereby a synthetic technique such as Merrifield synthesis (Merrifield, 1997), may be used to construct the entire peptide.

[0197] Other methods of constructing dimer peptides include introducing a linker molecule that activates the terminal end of a peptide so that it can covalently bind to a second peptide. Examples of such linkers include, but are not limited to, diaminoproprionic acid activated with an oxyamino function. A preferred linker is a dialdehyde having the formula O═CH—(CH₂)ₙ—CH═O, wherein n is at least 2 to 6, but is preferably 6 to produce a linker of about 25 to 30 angstroms in length. Other preferred linkers are shown in Table 3. Linkers may be used, for example, to couple monomers at either the carboxyl terminal or the amino terminal ends to form dimer peptides. Also, the chemistry can be inverted, i.e., the peptides to be coupled can be equipped with aldehyde functions, either by oxidation with sodium periodate of an N-terminal serine, or by oxidation of any other vicinal hydroxy- or amino-groups, and the linker can comprise two oxyamino functions (e.g., at end of a polyethylene glycol linker) or amino groups which are coupled by reductive amination.

[0198] In specific embodiments, Site 1-Site 2 and Site 2-Site 1 orientations are possible. In addition, N-terminal to N-terminal (N—N); C-terminal to C-terminal (C—C); N-terminal to C-terminal (N—C); and C-terminal to N-terminal (C—N) linkages are possible. Accordingly, peptides may be oriented Site 1 to Site 2, or Site 2 to Site 1, and may be linked N-terminus to N-terminus, C-terminus to C-terminus, N-terminus to C-terminus, or C-terminus to N-terminus. In certain cases, a specific orientation may be preferable to others, for example, for maximal agonist or antagonist activity.

[0199] In an unexpected and surprising result, the orientation and linkage of the monomer subunits has been found to dramatically alter dimer activity (see Examples, below). In particular, certain Site 1/Site 2 heterodimer sequences show agonist or antagonist activity at IR, depending on orientation and linkage of the constituent monomer subunits. For example, a Site 1-Site 2 orientation (C—N linkage), e.g., the S453 heterodimer, shows antagonist activity at IR (FIG. 18A; Table 7). In contrast, a Site 2-Site 1 orientation (C—N linkage), e.g., the S455 heterodimer, shows potent agonist activity at IR (FIG. 18D; Table 7). Similarly, Site 1-Site 2 (C—N linkage) heterodimers, e.g., S425 and S459, show antagonist activity at IR (Table 7), while Site 1-Site 2 (C—C or N—N linkage) heterodimers, e.g., S432-S438, S454, and S456, show agonist activity (Table 7).

[0200] Whether produced by recombinant gene expression or by conventional chemical linkage technology, the various amino acid sequences may be coupled through linkers of various lengths. Where linked sequences are expressed recombinantly, and based on an average amino acid length of about 4 angstroms, the linkers for connecting the two amino acid sequences would typically range from about 3 to about 12 amino acids corresponding to from about 12 to about 48 Å. Accordingly, the preferred distance between binding sequences is from about 2 to about 50 Å. More preferred is 4 to about 40. The degree of flexibility of the linker between the amino acid sequences may be modulated by the choice of amino acids used to construct the linker. The combination of glycine and serine is useful for producing a flexible, relatively unrestrictive linker. A more rigid linker may be constructed by using amino acids with more complex side chains within the linkage sequence.

[0201] Characterization Of Specific Dimers

[0202] Specific dimers which are comprised of monomer subunits that both bind with high affinity to the same site on IR (i.e., homodimers), or monomer subunits that bind to different sites on IR (i.e., heterodimers) are disclosed herein.

[0203] Other combinations of peptides are within the scope of this invention and may be determined as demonstrated in the examples described herein.

[0204] Peptide Synthesis

[0205] Many conventional techniques in molecular biology, protein biochemistry, and immunology may be used to produce the amino acid sequences for use with this invention. The present invention encompasses the specific amino acid sequences shown in FIGS. 1-4, 8, and 9 and Table 7, inter alia, without additions (e.g., linker or spacer sequences) deletions, alterations, or modification. The present invention further encompasses variants that include additional sequences, altered sequences, and functional fragments thereof. In a preferred embodiment, the amino acid sequence variant or fragment shares at least one function characteristic (e.g., binding, agonist, or antagonist activity) of the reference sequence. Variant peptides include, for example, genetically engineered mutants, and may differ from the amino acid sequences shown in the figures and tables of the application by the addition, deletion, or substitution of one or more amino acid residues. Alterations may occur at the amino- or carboxy-terminal positions of the reference amino acid sequence or anywhere between those terminal positions, interspersed either individually among the amino acids in the reference sequence or in one or more contiguous groups within the reference sequence. In addition, variants may comprise synthetic or non-naturally occurring amino acids in accordance with this invention.

[0206] Variant amino acid sequences can have conservative changes, wherein a substituted amino acid has similar structural or chemical properties, e.g., replacement of leucine with isoleucine. More infrequently, a variant peptide can have non-conservative changes, e.g., substitution of a glycine with a tryptophan. Guidance in determining which amino acid residues can be substituted, inserted, or deleted without abolishing binding or biological activity can be found using computer programs well known in the art, for example, DNASTAR software (DNASTAR, Inc., Madison, Wis.). Guidance is also provided by the data disclosed herein. In particular, FIGS. 1-4, 8, 9, 43, 44, and Table 7, inter alia, teach which amino acid residues can be deleted, added, substituted, or modified, while maintaining the IR- or IGF-1R-related function(s) (e.g., binding, agonist, or antagonist activity) of the amino acid sequences.

[0207] For the purposes of this invention, the amino acids are grouped as follows: amino acids possessing alcohol groups are serine (S) and threonine (T). Aliphatic amino acids are isoleucine (I), leucine (L), valine (V), and methionine (M). Aromatic amino acids are phenylalanine (F), histidine (H), tryptophan (W), and tyrosine (Y). Hydrophobic amino acids are alanine (A), cysteine (C), phenylalanine (F), glycine (G), histidine (H), isoleucine (I), leucine (L), methionine (M), arginine (R), threonine (T), valine (V), tryptophan (W), and tyrosine (Y). Negative amino acids are aspartic acid (D) and glutamic acid (E). The following amino acids are polar amino acids: cysteine (C), aspartic acid (D), glutamic acid (E), histidine (H), lysine (K), asparagine (N), glutamine (Q), arginine (R), serine (S), and threonine (T). Positive amino acids are histidine (H), lysine (K), and arginine (R). Small amino acids are alanine (A), cysteine (C), aspartic acid (D), glycine (G), asparagine (N), proline (P), serine (S), threonine (T), and valine (V). Very small amino acids are alanine (A), glycine (G) and serine (S). Amino acids likely to be involved in a turn formation are alanine (A), cysteine (C), aspartic acid (D), glutamic acid (E), glycine (G), histidine (H), lysine (K), asparagine (N), glutamine (Q), arginine (R), serine (S), proline (P), and threonine (T). As non-limiting examples, the amino acids within each of these defined groups may be substituted for each other in the formulas described above, as conservative substitutions, subject to the specific preferences stated herein.

[0208] Substantial changes in function can be made by selecting substitutions that are less conservative than those shown in the defined groups, above. For example, non-conservative substitutions can be made which more significantly affect the structure of the peptide in the area of the alteration, for example, the alpha-helical, or beta-sheet structure; the charge or hydrophobicity of the molecule at the target site; or the bulk of the side chain. The substitutions which generally are expected to produce the greatest changes in the peptide's properties are those where 1) a hydrophilic residue, e.g., seryl or threonyl, is substituted for (or by) a hydrophobic residue, e.g., leucyl, isoleucyl, phenylalanyl, valyl, or alanyl; 2) a cysteine or proline is substituted for (or by) any other residue; 3) a residue having an electropositive side chain, e.g., lysyl, arginyl, or histidyl, is substituted for (or by) an electronegative residue, e.g., glutamyl or aspartyl; or 4) a residue having a bulky side chain, e.g., phenylalanine, is substituted for (or by) a residue that does not have a side chain, e.g., glycine.

[0209] Amino acid preferences have been identified for certain peptides and peptide groups of the present invention. For example, amino acid preferences for the RP9, D8, and Group 6 (Formula 10) peptides are shown in Tables 17-19, below.

[0210] Variants also include amino acid sequences in which one or more residues are modified (i.e., by phosphorylation, sulfation, acylation, PEGylation, etc.), and mutants comprising one or more modified residues. Amino acid sequences may also be modified with a label capable of providing a detectable signal, either directly or indirectly, including, but not limited to, radioisotope, fluorescent, and enzyme labels. Fluorescent labels include, for example, Cy3, Cy5, Alexa, BODIPY, fluorescein (e.g., FluorX, DTAF, and FITC), rhodamine (e.g., TRITC), auramine, Texas Red, AMCA blue, and Lucifer Yellow. Preferred isotope labels include ³H, ¹⁴C, ³²P, ³⁵S, ³⁶Cl, ⁵¹Cr, ⁵⁷Co, ⁵⁸Co, ⁵⁹Fe, ⁹⁰Y, ¹²⁵I, ¹³¹I, and ¹⁸⁶Re. Preferred enzyme labels include peroxidase, β-glucuronidase, β-D-glucosidase, β-D-galactosidase, urease, glucose oxidase plus peroxidase, and alkaline phosphatase (see, e.g., U.S. Pat. Nos. 3,654,090; 3,850,752 and 4,016,043). Enzymes can be conjugated by reaction with bridging molecules such as carbodiimides, diisocyanates, glutaraldehyde, and the like. Enzyme labels can be detected visually, or measured by calorimetric, spectrophotometric, fluorospectrophotometric, amperometric, or gasometric techniques. Other labeling systems, such as avidin/biotin, Tyramide Signal Amplification (TSA™), are known in the art, and are commercially available (see, e.g., ABC kit, Vector Laboratories, Inc., Burlingame, Calif.; NEN® Life Science Products, Inc., Boston, Mass.).

[0211] Recombinant Synthesis of Peptides

[0212] To obtain recombinant peptides, DNA sequences encoding these peptides may be cloned into any suitable vectors for expression in intact host cells or in cell-free translation systems by methods well known in the art (see Sambrook et al., 1989). The particular choice of the vector, host, or translation system is not critical to the practice of the invention.

[0213] A large number of vectors, including bacterial, yeast, and mammalian vectors, have been described for replication and/or expression in various host cells or cell-free systems, and may be used for gene therapy as well as for simple cloning or protein expression. In one aspect of the present invention, an expression vector comprises a nucleic acid encoding a IR or IGF-1R agonist or antagonist peptide, as described herein, operably linked to at least one regulatory sequence. Regulatory sequences are known in the art and are selected to direct expression of the desired protein in an appropriate host cell. Accordingly, the term regulatory sequence includes promoters, enhancers and other expression control elements (see D. V. Goeddel (1990) Methods Enzymol. 185:3-7). Enhancer and other expression control sequences are described in Enhancers and Eukaryotic Gene Expression, Cold Spring Harbor Press, Cold Spring Harbor, N.Y. (1983). It should be understood that the design of the expression vector may depend on such factors as the choice of the host cell to be transfected and/or the type of peptide desired to be expressed.

[0214] Several regulatory elements (e.g., promoters) have been isolated and shown to be effective in the transcription and translation of heterologous proteins in the various hosts. Such regulatory regions, methods of isolation, manner of manipulation, etc. are known in the art. Non-limiting examples of bacterial promoters include the β-lactamase (penicillinase) promoter; lactose promoter; tryptophan (trp) promoter; araBAD (arabinose) operon promoter; lambda-derived P₁ promoter and N gene ribosome binding site; and the hybrid tac promoter derived from sequences of the trp and lac UV5 promoters. Non-limiting examples of yeast promoters include the 3-phosphoglycerate kinase promoter, glyceraldehyde-3-phosphate dehydrogenase (GAPDH) promoter, galactokinase (GAL1) promoter, galactoepimerase promoter, and alcohol dehydrogenase (ADH1) promoter. Suitable promoters for mammalian cells include, without limitation, viral promoters, such as those from Simian Virus 40 (SV40), Rous sarcoma virus (RSV), adenovirus (ADV), and bovine papilloma virus (BPV). Preferred replication and inheritance systems include M13, ColE1, SV40, baculovirus, lambda, adenovirus, CEN ARS, 2 μm ARS and the like. While expression vectors may replicate autonomously, they may also replicate by being inserted into the genome of the host cell, by methods well known in the art.

[0215] To obtain expression in eukaryotic cells, terminator sequences, polyadenylation sequences, and enhancer sequences that modulate gene expression may be required. Sequences that cause amplification of the gene may also be desirable. Furthermore, sequences that facilitate secretion of the recombinant product from cells, including, but not limited to, bacteria, yeast, and animal cells, such as secretory signal sequences and/or preprotein or proprotein sequences, may also be included. These sequences are well described in the art. DNA sequences can be optimized, if desired, for more efficient expression in a given host organism or expression system. For example, codons can be altered to conform to the preferred codon usage in a given host cell or cell-free translation system using well-established techniques.

[0216] Codon usage data can be obtained from publicly-available sources, for example, the Codon Usage Database at http://www.kazusa.or.jp/codon/. In addition, computer programs that translate amino acid sequence information into nucleotide sequence information in accordance with codon preferences (i.e., backtranslation programs) are widely available. See, for example, Backtranslate program from Genetics Computer Group (GCG), Accelrys, Inc., Madison, Wis.; and Backtranslation Applet from Entelechon GmbH, Regensburg, Germany. Thus, using the peptide sequences disclosed herein, one of ordinary skill in the art can design nucleic acids to yield optimal expression levels in the translation system or host cell of choice.

[0217] Expression and cloning vectors will likely contain a selectable marker, a gene encoding a protein necessary for survival or growth of a host cell transformed with the vector. The presence of this gene ensures growth of only those host cells that express the inserts. Typical selection genes encode proteins that 1) confer resistance to antibiotics or other toxic substances, e.g., ampicillin, neomycin, methotrexate, etc.; 2) complement auxotrophic deficiencies, or 3) supply critical nutrients not available from complex media, e.g., the gene encoding D-alanine racemase for Bacilli. Markers may be an inducible or non-inducible gene and will generally allow for positive selection. Non-limiting examples of markers include the ampicillin resistance marker (i.e., beta-lactamase), tetracycline resistance marker, neomycin/kanamycin resistance marker (i.e., neomycin phosphotransferase), dihydrofolate reductase, glutamine synthetase, and the like. The choice of the proper selectable marker will depend on the host cell, and appropriate markers for different hosts as understood by those of skill in the art.

[0218] Suitable expression vectors for use with the present invention include, but are not limited to, pUC, pBluescript (Stratagene), pET (Novagen, Inc., Madison, Wis.), and pREP (Invitrogen) plasmids. Vectors can contain one or more replication and inheritance systems for cloning or expression, one or more markers for selection in the host, e.g., antibiotic resistance, and one or more expression cassettes. The inserted coding sequences can be synthesized by standard methods, isolated from natural sources, or prepared as hybrids. Ligation of the coding sequences to transcriptional regulatory elements (e.g., promoters, enhancers, and/or insulators) and/or to other amino acid encoding sequences can be carried out using established methods.

[0219] Suitable cell-free expression systems for use with the present invention include, without limitation, rabbit reticulocyte lysate, wheat germ extract, canine pancreatic microsomal membranes, E. coli S30 extract, and coupled transcription/translation systems (Promega Corp., Madison, Wis.). These systems allow the expression of recombinant peptides upon the addition of cloning vectors, DNA fragments, or RNA sequences containing protein-coding regions and appropriate promoter elements.

[0220] Non-limiting examples of suitable host cells include bacteria, archea, insect, fungi (e.g., yeast), plant, and animal cells (e.g., mammalian, especially human). Of particular interest are Escherichia coli, Bacillus subtilis, Saccharomyces cerevisiae, SF9 cells, C129 cells, 293 cells, Neurospora, and immortalized mammalian myeloid and lymphoid cell lines. Techniques for the propagation of mammalian cells in culture are well-known (see, Jakoby and Pastan (Eds), 1979, Cell Culture. Methods in Enzymology, volume 58, Academic Press, Inc., Harcourt Brace Jovanovich, N.Y.). Examples of commonly used mammalian host cell lines are VERO and HeLa cells, CHO cells, and WI38, BHK, and COS cell lines, although it will be appreciated by the skilled practitioner that other cell lines may be used, e.g., to provide higher expression, or other features.

[0221] Host cells can be transformed, transfected, or infected as appropriate by any suitable method including electroporation, calcium chloride-, lithium chloride-, lithium acetate/polyethylene glycol-, calcium phosphate-, DEAE-dextran-, liposome-mediated DNA uptake, spheroplasting, injection, microinjection, microprojectile bombardment, phage infection, viral infection, or other established methods. Alternatively, vectors containing the nucleic acids of interest can be transcribed in vitro, and the resulting RNA introduced into the host cell by well-known methods, e.g., by injection (see, Kubo et al., 1988, FEBS Letts. 241:119). The cells into which have been introduced nucleic acids described above are meant to also include the progeny of such cells.

[0222] Nucleic acids encoding the peptides of the invention may be isolated directly from recombinant phage libraries (e.g., RAPIDLIB® or GRABLIB® libraries) described herein. Alternatively, the polymerase chain reaction (PCR) method can be used to produce nucleic acids of the invention, using the recombinant phage libraries as templates. Primers used for PCR can be synthesized using the sequence information provided herein and can further be designed to introduce appropriate new restriction sites, if desirable, to facilitate incorporation into a given vector for recombinant expression.

[0223] Nucleic acids encoding the peptides of the present invention can also be produced by chemical synthesis, e.g., by the phosphoramidite method described by Beaucage et al., 1981, Tetra. Letts. 22:1859-1862, or the triester method according to Matteucci et al., 1981, J. Am. Chem. Soc., 103:3185, and can performed on commercial, automated oligonucleotide synthesizers. A double-stranded fragment may be obtained from the single-stranded product of chemical synthesis either by synthesizing the complementary strand and annealing the strands together under appropriate conditions or by adding the complementary strand using DNA polymerase with an appropriate primer sequence.

[0224] The nucleic acids encoding the peptides of the invention can be produced in large quantities by replication in a suitable host cell. Natural or synthetic nucleic acid fragments, comprising at least ten contiguous bases coding for a desired amino acid sequence can be incorporated into recombinant nucleic acid constructs, usually DNA constructs, capable of introduction into and replication in a prokaryotic or eukaryotic cell. Usually the nucleic acid constructs will be suitable for replication in a unicellular host, such as yeast or bacteria, but may also be intended for introduction to (with and without integration within the genome) cultured mammalian or plant or other eukaryotic cells, cell lines, tissues, or organisms. The purification of nucleic acids produced by the methods of the present invention is described, for example, in Sambrook et al., 1989; F. M. Ausubel et al., 1992, Current Protocols in Molecular Biology, J. Wiley and Sons, New York, N.Y.

[0225] These nucleic acids can encode variant or truncated forms of the peptides as well as the reference peptides shown in FIGS. 1-4, 8, and 9 and Table 7, inter alia. Large quantities of the nucleic acids and peptides of the present invention may be prepared by expressing the nucleic acids or portions thereof in vectors or other expression vehicles in compatible prokaryotic or eukaryotic host cells. The most commonly used prokaryotic hosts are strains of Escherichia coli, although other prokaryotes, such as Bacillus subtilis or Pseudomonas may also be used. Mammalian or other eukaryotic host cells, such as those of yeast, filamentous fungi, plant, insect, or amphibian or avian species, may also be useful for production of the proteins of the present invention. For example, insect cell systems (i.e., lepidopteran host cells and baculovirus expression vectors) are particularly suited for large-scale protein production.

[0226] Host cells carrying an expression vector (i.e., transformants or clones) are selected using markers depending on the mode of the vector construction. The marker may be on the same or a different DNA molecule, preferably the same DNA molecule. In prokaryotic hosts, the transformant may be selected, e.g., by resistance to ampicillin, tetracycline or other antibiotics. Production of a particular product based on temperature sensitivity may also serve as an appropriate marker.

[0227] For some purposes, it is preferable to produce the peptide in a recombinant system in which the peptide contains an additional sequence (e.g., epitope or protein) tag that facilitates purification. Non-limiting examples of epitope tags include c-myc, haemagglutinin (HA), polyhistidine (6X-HIS) (SEQ ID NO: 1778), GLU-GLU, and DYKDDDDK (SEQ ID NO:1779) or DYKD (SEQ ID NO:1545; FLAG®) epitope tags. Non-limiting examples of protein tags include glutathione-S-transferase (GST), green fluorescent protein (GFP), and maltose binding protein (MBP). In one approach, the coding sequence of a peptide can be cloned into a vector that creates a fusion with a sequence tag of interest. Suitable vectors include, without limitation, PRSET (Invitrogen Corp., San Diego, Calif.), PGEX (Amersham Pharmacia Biotech, Inc., Piscataway, N.J.), PEGFP (CLONTECH Laboratories, Inc., Palo Alto, Calif.), and PMAL™ (New England BioLabs, Inc., Beverly, Mass.) plasmids. Following expression, the epitope or protein tagged peptide can be purified from a crude lysate of the translation system or host cell by chromatography on an appropriate solid-phase matrix. In some cases, it may be preferable to remove the epitope or protein tag (i.e., via protease cleavage) following purification.

[0228] Methods for directly purifying peptides from sources such as cellular or extracellular lysates are well known in the art (see Harris and Angal, 1989). Such methods include, without limitation, sodium dodecylsulfate-polyacrylamide gel electrophoresis (SDS-PAGE), preparative disc-gel electrophoresis, isoelectric focusing, high-performance liquid chromatography (HPLC), reversed-phase HPLC, gel filtration, ion exchange and partition chromatography, countercurrent distribution, and combinations thereof. Peptides can be purified from many possible sources, for example, plasma, body tissues, or body fluid lysates derived from human or animal, including mammalian, bird, fish, and insect sources.

[0229] Antibody-based methods may also be used to purify peptides. Antibodies that recognize these peptides or fragments derived therefrom can be produced and isolated. The peptide can then be purified from a crude lysate by chromatography on an antibody-conjugated solid-phase matrix (see Harlow and Lane, 1998).

[0230] Chemical Synthesis of Peptides

[0231] Alternately, peptides may be chemically synthesized by commercially available automated procedures, including, without limitation, exclusive solid phase synthesis, partial solid phase methods, fragment condensation or classical solution synthesis. The peptides are preferably prepared by solid-phase peptide synthesis; for example, as described by Merrifield (1965; 1997).

[0232] According to methods known in the art, peptides can be chemically synthesized by commercially available automated procedures, including, without limitation, exclusive solid phase synthesis, partial solid phase methods, fragment condensation, classical solution synthesis. In addition, recombinant and synthetic methods of peptide production can be combined to produce semi-synthetic peptides. The peptides of the invention are preferably prepared by solid phase peptide synthesis as described by Merrifield, 1963, J. Am. Chem. Soc. 85:2149; 1997. In one embodiment, synthesis is carried out with amino acids that are protected at the alpha-amino terminus. Trifunctional amino acids with labile side-chains are also protected with suitable groups to prevent undesired chemical reactions from occurring during the assembly of the peptides. The alpha-amino protecting group is selectively removed to allow subsequent reaction to take place at the amino-terminus. The conditions for the removal of the alpha-amino protecting group do not remove the side-chain protecting groups.

[0233] The alpha-amino protecting groups are those known to be useful in the art of stepwise peptide synthesis. Included are acyl type protecting groups, e.g., formyl, trifluoroacetyl, acetyl, aromatic urethane type protecting groups, e.g., benzyloxycarbonyl (Cbz), substituted benzyloxycarbonyl and 9-fluorenylmethyloxycarbonyl (Fmoc), aliphatic urethane protecting groups, e.g., t-butyloxycarbonyl (Boc), isopropyloxycarbonyl, cyclohexyloxycarbonyl, and alkyl type protecting groups, e.g., benzyl, triphenylmethyl. The preferred protecting group is Boc. The side-chain protecting groups for Tyr include tetrahydropyranyl, tert-butyl, trityl, benzyl, Cbz, 4-Br-Cbz and 2,6-dichlorobenzyl. The preferred side-chain protecting group for Tyr is 2,6-dichlorobenzyl. The side-chain protecting groups for Asp include benzyl, 2,6-dichlorobenzyl, methyl, ethyl, and cyclohexyl. The preferred side-chain protecting group for Asp is cyclohexyl. The side-chain protecting groups for Thr and Ser include acetyl, benzoyl, trityl, tetrahydropyranyl, benzyl, 2,6-dichlorobenzyl, and Cbz. The preferred protecting group for Thr and Ser is benzyl. The side-chain protecting groups for Arg include nitro, Tos, Cbz, adamantyloxycarbonyl, and Boc. The preferred protecting group for Arg is Tos. The side-chain amino group of Lys can be protected with Cbz, 2-Cl-Cbz, Tos, or Boc. The 2-CI-Cbz group is the preferred protecting group for Lys.

[0234] The side-chain protecting groups selected must remain intact during coupling and not be removed during the deprotection of the amino-terminus protecting group or during coupling conditions. The side-chain protecting groups must also be removable upon the completion of synthesis, using reaction conditions that will not alter the finished peptide.

[0235] Solid phase synthesis is usually carried out from the carboxy-terminus by coupling the alpha-amino protected (side-chain protected) amino acid to a suitable solid support. An ester linkage is formed when the attachment is made to a chloromethyl or hydroxymethyl resin, and the resulting peptide will have a free carboxyl group at the C-terminus. Alternatively, when a benzhydrylamine or p-methylbenzhydrylamine resin is used, an amide bond is formed and the resulting peptide will have a carboxamide group at the C-terminus. These resins are commercially available, and their preparation has described by Stewart et al., 1984, Solid Phase Peptide Synthesis (2nd Edition), Pierce Chemical Co., Rockford, Ill.

[0236] The C-terminal amino acid, protected at the side chain if necessary and at the alpha-amino group, is coupled to the benzhydrylamine resin using various activating agents including dicyclohexylcarbodiimide (DCC), N,N′-diisopropyl-carbodiimide and carbonyldiimidazole. Following the attachment to the resin support, the alpha-amino protecting group is removed using trifluoroacetic acid (TFA) or HCl in dioxane at a temperature between 0 and 25° C. Dimethylsulfide is added to the TFA after the introduction of methionine (Met) to suppress possible S-alkylation. After removal of the alpha-amino protecting group, the remaining protected amino acids are coupled stepwise in the required order to obtain the desired sequence. Various activating agents can be used for the coupling reactions including DCC,N,N′-diisopropyl-carbodiimide, benzotriazol-1-yl-oxy-tris-(dimethylamino) phosphonium hexa-fluorophosphate (BOP) and DCC-hydroxybenzotriazole (HOBt). Each protected amino acid is used in excess (>2.0 equivalents), and the couplings are usually carried out in N-methylpyrrolidone (NMP) or in DMF, CH2Cl2 or mixtures thereof. The extent of completion of the coupling reaction is monitored at each stage, e.g., by the ninhydrin reaction as described by Kaiser et al., 1970, Anal. Biochem. 34:595. In cases where incomplete coupling is found, the coupling reaction is repeated. The coupling reactions can be performed automatically with commercially available instruments.

[0237] After the entire assembly of the desired peptide, the peptide-resin is cleaved with a reagent such as liquid HF for 1-2 hours at 0° C., which cleaves the peptide from the resin and removes all side-chain protecting groups. A scavenger such as anisole is usually used with the liquid HF to prevent cations formed during the cleavage from alkylating the amino acid residues present in the peptide. The peptide-resin can be deprotected with TFA/dithioethane prior to cleavage if desired.

[0238] Side-chain to side-chain cyclization on the solid support requires the use of an orthogonal protection scheme which enables selective cleavage of the side-chain functions of acidic amino acids (e.g., Asp) and the basic amino acids (e.g., Lys). The 9-fluorenylmethyl (Fm) protecting group for the side-chain of Asp and the 9-fluorenylmethyloxycarbonyl (Fmoc) protecting group for the side-chain of Lys can be used for this purpose. In these cases, the side-chain protecting groups of the Boc-protected peptide-resin are selectively removed with piperidine in DMF. Cyclization is achieved on the solid support using various activating agents including DCC, DCC/HOBt, or BOP. The HF reaction is carried out on the cyclized peptide-resin as described above.

[0239] Peptide Libraries

[0240] Peptide libraries produced and screened according to the present invention are useful in providing new ligands for IR and IGF-1R. Peptide libraries can be designed and panned according to methods described in detail herein, and methods generally available to those in the art (see, e.g., U.S. Pat. No. 5,723,286 issued Mar. 3, 1998 to Dower et al.). In one aspect, commercially available phage display libraries can be used (e.g., RAPIDLIB® or GRABLIB®, DGI BioTechnologies, Inc., Edison, N.J.; Ph.D. C7C Disulfide Constrained Peptide Library, New England Biolabs). In another aspect, an oligonucleotide library can be prepared according to methods known in the art, and inserted into an appropriate vector for peptide expression. For example, vectors encoding a bacteriophage structural protein, preferably an accessible phage protein, such as a bacteriophage coat protein, can be used. Although one skilled in the art will appreciate that a variety of bacteriophage may be employed in the present invention, in preferred embodiments the vector is, or is derived from, a filamentous bacteriophage, such as, for example, f1, fd, Pf1, M13, etc. In particular, the fd-tet vector has been extensively described in the literature (see, e.g., Zacher et al., 1980, Gene 9:127-140; Smith et al., 1985, Science 228:1315-1317; Parmley and Smith, 1988, Gene 73:305-318).

[0241] The phage vector is chosen to contain or is constructed to contain a cloning site located in the 5′ region of the gene encoding the bacteriophage structural protein, so that the peptide is accessible to receptors in an affinity enrichment procedure as described hereinbelow. The structural phage protein is preferably a coat protein. An example of an appropriate coat protein is pill. A suitable vector may allow oriented cloning of the oligonucleotide sequences that encode the peptide so that the peptide is expressed at or within a distance of about 100 amino acid residues of the N-terminus of the mature coat protein. The coat protein is typically expressed as a preprotein, having a leader sequence.

[0242] Thus, desirably the oligonucleotide library is inserted so that the N-terminus of the processed bacteriophage outer protein is the first residue of the peptide, i.e., between the 3′-terminus of the sequence encoding the leader protein and the 5′-terminus of the sequence encoding the mature protein or a portion of the 5′ terminus. The library is constructed by cloning an oligonucleotide which contains the variable region of library members (and any spacers, as discussed below) into the selected cloning site. Using known recombinant DNA techniques (see generally, Sambrook et al., 1989, Molecular Cloning, A Laboratory Manual, 2d ed., Cold Spring Harbor Laboratory Press, Cold Spring Harbor, N.Y., 1989), an oligonucleotide may be constructed which, inter alia; 1) removes unwanted restriction sites and adds desired ones; 2) reconstructs the correct portions of any sequences which have been removed (such as a correct signal peptidase site, for example); 3) inserts the spacer residues, if any; and/or 4) corrects the translation frame (if necessary) to produce active, infective phage.

[0243] The central portion of the oligonucleotide will generally contain one or more IR and/or IGF-1R binding sequences and, optionally, spacer sequences. The sequences are ultimately expressed as peptides (with or without spacers) fused to or in the N-terminus of the mature coat protein on the outer, accessible surface of the assembled bacteriophage particles. The size of the library will vary according to the number of variable codons, and hence the size of the peptides, which are desired. Generally the library will be at least about 10⁶ members, usually at least 10⁷, and typically 10⁸ or more members. To generate the collection of oligonucleotides which forms a series of codons encoding a random collection of amino acids and which is ultimately cloned into the vector, a codon motif is used, such as (NNK)ₓ, where N may be A, C, G, or T (nominally equimolar), K is G or T (nominally equimolar), and x is typically up to about 5, 6, 7, 8, or more, thereby producing libraries of penta-, hexa-, hepta-, and octa-peptides or larger. The third position may also be G or C, designated “S”. Thus, NNK or NNS 1) code for all the amino acids; 2) code for only one stop codon; and 3) reduce the range of codon bias from 6:1 to 3:1.

[0244] It should be understood that, with longer peptides, the size of the library that is generated may become a constraint in the cloning process. The expression of peptides from randomly generated mixtures of oligonucleotides in appropriate recombinant vectors is known in the art (see, e.g., Oliphant et al., Gene 44:177-183). For example, the codon motif (NNK)₆ produces 32 codons, one for each of 12 amino acids, two for each of five amino acids, three for each of three amino acids and one (amber) stop codon. Although this motif produces a codon distribution as equitable as available with standard methods of oligonucleotide synthesis, it results in a bias against peptides containing one-codon residues. In particular, a complete collection of hexacodons contains one sequence encoding each peptide made up of only one-codon amino acids, but contains 729 (3⁶) sequences encoding each peptide with only three-codon amino acids.

[0245] An alternative approach to minimize the bias against one-codon residues involves the synthesis of 20 activated trinucleotides, each representing the codon for one of the 20 genetically encoded amino acids. These are synthesized by conventional means, removed from the support while maintaining the base and 5-OH-protecting groups, and activated by the addition of 3′O-phosphoramidite (and phosphate protection with b-cyanoethyl groups) by the method used for the activation of mononucleosides (see, generally, McBride and Caruthers, 1983, Tetrahedron Letters 22:245). Degenerate oligocodons are prepared using these trimers as building blocks. The trimers are mixed at the desired molar ratios and installed in the synthesizer. The ratios will usually be approximately equimolar, but may be a controlled unequal ratio to obtain the over- to under-representation of certain amino acids coded for by the degenerate oligonucleotide collection. The condensation of the trimers to form the oligocodons is done essentially as described for conventional synthesis employing activated mononucleosides as building blocks (see, e.g., Atkinson and Smith, 1984, Oligonucleotide Synthesis, M. J. Gait, Ed., p. 35-82). This procedure generates a population of oligonucleotides for cloning that is capable of encoding an equal distribution (or a controlled unequal distribution) of the possible peptide sequences. Advantageously, this approach may be employed in generating longer peptide sequences, since the range of bias produced by the (NNK)₆ motif increases by three-fold with each additional amino acid residue.

[0246] When the codon motif is (NNK)ₓ, as defined above, and when x equals 8, there are 2.6.×10¹⁰ possible octa-peptides. A library containing most of the octa-peptides may be difficult to produce. Thus, a sampling of the octa-peptides may be accomplished by constructing a subset library using up to about 10% of the possible sequences, which subset of recombinant bacteriophage particles is then screened. If desired, to extend the diversity of a subset library, the recovered phage subset may be subjected to mutagenesis and then subjected to subsequent rounds of screening. This mutagenesis step may be accomplished in two general ways: the variable region of the recovered phage may be mutagenized, or additional variable amino acids may be added to the regions adjoining the initial variable sequences.

[0247] To diversify around active peptides (i.e., binders) found in early rounds of panning, the positive phage can sequenced to determine the identity of the active peptides. Oligonucleotides can then be synthesized based on these peptide sequences. The syntheses are done with a low level of all bases incorporated at each step to produce slight variations of the primary oligonucleotide sequences. This mixture of (slightly) degenerate oligonucleotides can then be cloned into the affinity phage by methods known to those in the art. This method produces systematic, controlled variations of the starting peptide sequences as part of a secondary library. It requires, however, that individual positive phage be sequenced before mutagenesis, and thus is useful for expanding the diversity of small numbers of recovered phage.

[0248] An alternate approach to diversify the selected phage allows the mutagenesis of a pool, or subset, of recovered phage. In accordance with this approach, phage recovered from panning are pooled and single stranded DNA is isolated. The DNA is mutagenized by treatment with, e.g., nitrous acid, formic acid, or hydrazine. These treatments produce a variety of damage to the DNA. The damaged DNA is then copied with reverse transcriptase, which misincorporates bases when it encounters a site of damage. The segment containing the sequence encoding the receptor-binding peptide is then isolated by cutting with restriction nuclease(s) specific for sites flanking the peptide coding sequence. This mutagenized segment is then recloned into undamaged vector DNA, the DNA is transformed into cells, and a secondary library according to known methods. General mutagenesis methods are known in the art (see Myers et al., 1985, Nucl. Acids Res. 13:3131-3145; Myers et al., 1985, Science 229:242-246; Myers, 1989, Current Protocols in Molecular Biology Vol. I, 8.3.1-8.3.6, F. Ausubel et al., eds, J. Wiley and Sons, New York).

[0249] In another general approach, the addition of amino acids to a peptide or peptides found to be active, can be carried out using various methods. In one, the sequences of peptides selected in early panning are determined individually and new oligonucleotides, incorporating the determined sequence and an adjoining degenerate sequence, are synthesized. These are then cloned to produce a secondary library. Alternatively, methods can be used to add a second IR or IGF-1R binding sequence to a pool of peptide-bearing phage. In accordance with one method, a restriction site is installed next to the first IR or IGF-1R binding sequence. Preferably, the enzyme should cut outside of its recognition sequence. The recognition site may be placed several bases from the first binding sequence. To insert a second IR or IGF-1R binding sequence, the pool of phage DNA is digested and blunt-ended by filling in the overhang with Klenow fragment. Double-stranded, blunt-ended, degenerately synthesized oligonucleotides are then ligated into this site to produce a second binding sequence juxtaposed to the first binding sequence. This secondary library is then amplified and screened as before.

[0250] While in some instances it may be appropriate to synthesize longer peptides to bind certain receptors, in other cases it may be desirable to provide peptides having two or more IR or IGF-1R binding sequences separated by spacer (e.g., linker) residues. For example, the binding sequences may be separated by spacers that allow the regions of the peptides to be presented to the receptor in different ways. The distance between binding regions may be as little as 1 residue, or at least 2-20 residues, or up to at least 100 residues. Preferred spacers are 3, 6, 9, 12, 15, or 18 residues in length. For probing large binding sites or tandem binding sites (e.g., Site 1 and Site 2 of IR), the binding regions may be separated by a spacer of residues of up to 20 to 30 amino acids. The number of spacer residues when present will typically be at least 2 residues, and often will be less than 20 residues.

[0251] The oligonucleotide library may have binding sequences which are separated by spacers (e.g., linkers), and thus may be represented by the formula: (NNK)_{y}−(abc)ₙ−(NNK)_{z} where N and K are as defined previously (note that S as defined previously may be substituted for K), and y+z is equal to about 5, 6, 7, 8, or more, a, b and c represent the same or different nucleotides comprising a codon encoding spacer amino acids, n is up to about 3, 6, 9, or 12 amino acids, or more. The spacer residues may be somewhat flexible, comprising oligo-glycine, or oligo-glycine-glycine-serine, for example, to provide the diversity domains of the library with the ability to interact with sites in a large binding site relatively unconstrained by attachment to the phage protein. Rigid spacers, such as, e.g., oligo-proline, may also be inserted separately or in combination with other spacers, including glycine spacers. It may be desired to have the IR or IGF-1R binding sequences close to one another and use a spacer to orient the binding sequences with respect to each other, such as by employing a turn between the two sequences, as might be provided by a spacer of the sequence glycine-proline-glycine, for example. To add stability to such a turn, it may be desirable or necessary to add cysteine residues at either or both ends of each variable region. The cysteine residues would then form disulfide bridges to hold the variable regions together in a loop, and in this fashion may also serve to mimic a cyclic peptide. Of course, those skilled in the art will appreciate that various other types of covalent linkages for cyclization may also be used.

[0252] Spacer residues as described above may also be situated on either or both ends of the IR or IGF-1R binding sequences. For instance, a cyclic peptide may be designed without an intervening spacer, by having a cysteine residue on both ends of the peptide. As described above, flexible spacers, e.g., oligo-glycine, may facilitate interaction of the peptide with the selected receptors. Alternatively, rigid spacers may allow the peptide to be presented as if on the end of a rigid arm, where the number of residues, e.g., proline residues, determines not only the length of the arm but also the direction for the arm in which the peptide is oriented. Hydrophilic spacers, made up of charged and/or uncharged hydrophilic amino acids, (e.g., Thr, His, Asn, Gln, Arg, Glu, Asp, Met, Lys, etc.), or hydrophobic spacers of hydrophobic amino acids (e.g., Phe, Leu, Ile, Gly, Val, Ala, etc.) may be used to present the peptides to receptor binding sites with a variety of local environments.

[0253] Notably, some peptides, because of their size and/or sequence, may cause severe defects in the infectivity of their carrier phage. This causes a loss of phage from the population during reinfection and amplification following each cycle of panning. To minimize problems associated with defective infectivity, DNA prepared from the eluted phage can be transformed into appropriate host cells, such as, e.g., E. coli, preferably by electroporation (see, e.g., Dower et al., Nucl. Acids Res. 16:6127-6145), or well known chemical means. The cells are cultivated for a period of time sufficient for marker expression, and selection is applied as typically done for DNA transformation. The colonies are amplified, and phage harvested for affinity enrichment in accordance with established methods. Phage identified in the affinity enrichment may be re-amplified by infection into the host cells. The successful transformants are selected by growth in an appropriate antibiotic(s), e.g., tetracycline or ampicillin. This may be done on solid or in liquid growth medium.

[0254] For growth on solid medium, the cells are grown at a high density (about 10⁸ to 10⁹ transformants per m²) on a large surface of, for example, L-agar containing the selective antibiotic to form essentially a confluent lawn. The cells and extruded phage are scraped from the surface and phage are prepared for the first round of panning (see, e.g., Parmley and Smith, 1988, Gene 73:305-318). For growth in liquid culture, cells may be grown in L-broth and antibiotic through about 10 or more doublings. The phage are harvested by standard procedures (see Sambrook et al., 1989, Molecular Cloning, 2^{nd} ed.). Growth in liquid culture may be more convenient because of the size of the libraries, while growth on solid media likely provides less chance of bias during the amplification process.

[0255] For affinity enrichment of desired clones, generally about 10³ to 10⁴ library equivalents (a library equivalent is one of each recombinant; 10⁴ equivalents of a library of 10⁹ members is 10⁹×10⁴=10¹³ phage), but typically at least 10² library equivalents, up to about 10⁵ to 10⁶, are incubated with a receptor (or portion thereof) to which the desired peptide is sought. The receptor is in one of several forms appropriate for affinity enrichment schemes. In one example the receptor is immobilized on a surface or particle, and the library of phage bearing peptides is then panned on the immobilized receptor generally according to procedures known in the art. In an alternate scheme, a receptor is attached to a recognizable ligand (which may be attached via a tether). A specific example of such a ligand is biotin. The receptor, so modified, is incubated with the library of phage and binding occurs with both reactants in solution. The resulting complexes are then bound to streptavidin (or avidin) through the biotin moiety. The streptavidin may be immobilized on a surface such as a plastic plate or on particles, in which case the complexes (phage/peptide/receptor/biotin/streptavidin) are physically retained; or the streptavidin may be labeled, with a fluorophor, for example, to tag the active phage/peptide for detection and/or isolation by sorting procedures, e.g., on a fluorescence-activated cell sorter.

[0256] Phage that associate with IR or IGF-1R via non-specific interactions are removed by washing. The degree and stringency of washing required will be determined for each receptor/peptide of interest. A certain degree of control can be exerted over the binding characteristics of the peptides recovered by adjusting the conditions of the binding incubation and the subsequent washing. The temperature, pH, ionic strength, divalent cation concentration, and the volume and duration of the washing will select for peptides within particular ranges of affinity for the receptor. Selection based on slow dissociation rate, which is usually predictive of high affinity, is the most practical route. This may be done either by continued incubation in the presence of a saturating amount of free ligand, or by increasing the volume, number, and length of the washes. In each case, the rebinding of dissociated peptide-phage is prevented, and with increasing time, peptide-phage of higher and higher affinity are recovered. Additional modifications of the binding and washing procedures may be applied to find peptides that bind receptors under special conditions. Once a peptide sequence that imparts some affinity and specificity for the receptor molecule is known, the diversity around this binding motif may be embellished. For instance, variable peptide regions may be placed on one or both ends of the identified sequence. The known sequence may be identified from the literature, or may be derived from early rounds of panning in the context of the present invention.

[0257] Screening Assays

[0258] In another embodiment of this invention, screening assays to identify pharmacologically active ligands at IR and/or IGF-1R are provided. Ligands may encompass numerous chemical classes, though typically they are organic molecules, preferably small organic compounds having a molecular weight of more than 50 and less than about 2,500 daltons. Such ligands can comprise functional groups necessary for structural interaction with proteins, particularly hydrogen bonding, and typically include at least an amine, carbonyl, hydroxyl or carboxyl group, preferably at least two of the functional chemical groups. Ligands often comprise cyclical carbon or heterocyclic structures and/or aromatic or polyaromatic structures substituted with one or more of the above functional groups. Ligands can also comprise biomolecules including peptides, saccharides, fatty acids, steroids, purines, pyrimidines, derivatives, structural analogs, or combinations thereof.

[0259] Ligands may include, for example, 1) peptides such as soluble peptides, including Ig-tailed fusion peptides and members of random peptide libraries (see, e.g., Lam et al, 1991, Nature 354:82-84; Houghten et al, 1991, Nature 354:84-86) and combinatorial chemistry-derived molecular libraries made of D- and/or L-configuration amino acids; 2) phosphopeptides (e.g., members of random and partially degenerate, directed phosphopeptide libraries, see, e.g., Songyang et al, 1993, Cell 72:767-778); 3) antibodies (e.g., polyclonal, monoclonal, humanized, anti-idiotypic, chimeric, and single chain antibodies as well as Fab, F(ab′)₂, Fab expression library fragments, and epitope-binding fragments of antibodies); and 4) small organic and inorganic molecules.

[0260] Ligands can be obtained from a wide variety of sources including libraries of synthetic or natural compounds. Synthetic compound libraries are commercially available from, for example, Maybridge Chemical Co. (Trevillet, Cornwall, UK), Comgenex (Princeton, N.J.), Brandon Associates (Merrimack, N.H.), and Microsource (New Milford, Conn.). A rare chemical library is available from Aldrich Chemical Company, Inc. (Milwaukee, Wis.). Natural compound libraries comprising bacterial, fungal, plant or animal extracts are available from, for example, Pan Laboratories (Bothell, Wash.). In addition, numerous means are available for random and directed synthesis of a wide variety of organic compounds and biomolecules, including expression of randomized oligonucleotides.

[0261] Alternatively, libraries of natural compounds in the form of bacterial, fungal, plant and animal extracts can be readily produced. Methods for the synthesis of molecular libraries are readily available (see, e.g., DeWitt et al., 1993, Proc. Natl. Acad. Sci. USA 90:6909; Erb et al., 1994, Proc. Natl. Acad. Sci. USA 91:11422; Zuckermann et al., 1994, J. Med. Chem. 37:2678; Cho et al., 1993, Science 261:1303; Carell et al., 1994, Angew. Chem. Int. Ed. Engl. 33:2059; Carell et al., 1994, Angew. Chem. Int. Ed. Engl. 33:2061; and in Gallop et al., 1994, J. Med. Chem. 37:1233). In addition, natural or synthetic compound libraries and compounds can be readily modified through conventional chemical, physical and biochemical means (see, e.g., Blondelle et al., 1996, Trends in Biotech. 14:60), and may be used to produce combinatorial libraries. In another approach, previously identified pharmacological agents can be subjected to directed or random chemical modifications, such as acylation, alkylation, esterification, amidification, and the analogs can be screened for IR-modulating activity.

[0262] Numerous methods for producing combinatorial libraries are known in the art, including those involving biological libraries; spatially addressable parallel solid phase or solution phase libraries; synthetic library methods requiring deconvolution; the ‘one-bead one-compound’ library method; and synthetic library methods using affinity chromatography selection. The biological library approach is limited to polypeptide or peptide libraries, while the other four approaches are applicable to polypeptide, peptide, non-peptide oligomer, or small molecule libraries of compounds (K. S. Lam, 1997, Anticancer Drug Des. 12:145).

[0263] Libraries may be screened in solution by methods generally known in the art for determining whether ligands competitively bind at a common binding site. Such methods may including screening libraries in solution (e.g., Houghten, 1992, Biotechniques 13:412-421), or on beads (Lam, 1991, Nature 354:82-84), chips (Fodor, 1993, Nature 364:555-556), bacteria or spores (Ladner U.S. Pat. No. 5,223,409), plasmids (Cull et al., 1992, Proc. Natl. Acad. Sci. USA 89:1865-1869), or on phage (Scott and Smith, 1990, Science 249:386-390; Devlin, 1990, Science 249:404-406; Cwirla et al., 1990, Proc. Natl. Acad. Sci. USA 97:6378-6382; Felici, 1991, J. Mol. Biol. 222:301-310; Ladner, supra).

[0264] Where the screening assay is a binding assay, IR, or one of the IR-binding peptides disclosed herein, may be joined to a label, where the label can directly or indirectly provide a detectable signal. Various labels include radioisotopes, fluorescent molecules, chemiluminescent molecules, enzymes, specific binding molecules, particles, e.g., magnetic particles, and the like. Specific binding molecules include pairs, such as biotin and streptavidin, digoxin and antidigoxin, etc. For the specific binding members, the complementary member would normally be labeled with a molecule that provides for detection, in accordance with known procedures.

[0265] A variety of other reagents may be included in the screening assay. These include reagents like salts, neutral proteins, e.g., albumin, detergents, etc., which are used to facilitate optimal protein-protein binding and/or reduce non-specific or background interactions. Reagents that improve the efficiency of the assay, such as protease inhibitors, nuclease inhibitors, anti-microbial agents, etc., may be used. The components are added in any order that produces the requisite binding. Incubations are performed at any temperature that facilitates optimal activity, typically between 4° and 40° C. Incubation periods are selected for optimum activity, but may also be optimized to facilitate rapid high-throughput screening. Normally, between 0.1 and 1 hr will be sufficient. In general, a plurality of assay mixtures is run in parallel with different test agent concentrations to obtain a differential response to these concentrations. Typically, one of these concentrations serves as a negative control, i.e., at zero concentration or below the level of detection.

[0266] The screening assays provided in accordance with this invention are based on those disclosed in International application WO 96/04557, which is incorporated herein in its entirety. Briefly, WO 96/04557 discloses the use of reporter peptides that bind to active sites on targets and possess agonist or antagonist activity at the target. These reporters are identified from recombinant libraries and are either peptides with random amino acid sequences or variable antibody regions with at least one CDR region that has been randomized (rVab). The reporter peptides may be expressed in cell recombinant expression systems, such as for example in E. coli, or by phage display (see WO 96/04557 and Kay et al. 1996, Mol. Divers. 1(2):139-40, both of which are incorporated herein by reference). The reporters identified from the libraries may then be used in accordance with this invention either as therapeutics themselves, or in competition binding assays to screen for other molecules, preferably small, active molecules, which possess similar properties to the reporters and may be developed as drug candidates to provide agonist or antagonist activity. Preferably, these small organic molecules are orally active.

[0267] The basic format of an in vitro competitive receptor binding assay as the basis of a heterogeneous screen for small organic molecular replacements for insulin may be as follows: occupation of the active site of IR is quantified by time-resolved fluorometric detection (TRFD) with streptavidin-labeled europium (saEu) complexed to biotinylated peptides (bP). In this assay, saEu forms a ternary complex with bP and IR (i.e., IR:bP:saEu complex). The TRFD assay format is well established, sensitive, and quantitative (Tompkins et al., 1993, J. Immunol. Methods 163:209-216). The assay can use a single-chain antibody or a biotinylated peptide. Furthermore, both assay formats faithfully report the competition of the biotinylated ligands binding to the active site of IR by insulin.

[0268] In these assays, soluble IR is coated on the surface of microtiter wells, blocked by a solution of 0.5% bovine serum albumin (BSA) and 2% non-fat milk in PBS, and then incubated with biotinylated peptide or rVab. Unbound bP is then washed away and saEu is added to complex with receptor-bound bP. Upon addition of the acidic enhancement solution, the bound europium is released as free Eu³⁺ which rapidly forms a highly fluorescent and stable complex with components of the enhancement solution. The IR:bP bound saEu is then converted into its highly fluorescent state and detected by a detector such as Wallac Victor II (EG&G Wallac, Inc.)

[0269] Phage display libraries can also be screened for ligands that bind to IR or IGF-1R, as described above. Details of the construction and analyses of these libraries, as well as the basic procedures for biopanning and selection of binders, have been published (see, e.g., WO 96/04557; Mandecki et al., 1997, Display Technologies—Novel Targets and Strategies, P. Guttry (ed), International Business Communications, Inc. Southborogh, Mass., pp. 231-254; Ravera et al., 1998, Oncogene 16:1993-1999; Scott and Smith, 1990, Science 249:386-390); Grihalde et al., 1995, Gene 166:187-195; Chen et al., 1996, Proc. Natl. Acad. Sci. USA 93:1997-2001; Kay et al., 1993, Gene 128:59-65; Carcamo et al., 1998, Proc. Natl. Acad. Sci. USA 95:11146-11151; Hoogenboom, 1997, Trends Biotechnol. 15:62-70; Rader and Barbas, 1997, Curr. Opin. Biotechnol. 8:503-508; all of which are incorporated herein by reference).

[0270] The designing of mimetics to a known pharmaceutically active compound is a known approach to the development of pharmaceuticals based on a “lead” compound. This might be desirable where the active compound is difficult or expensive to synthesize or where it is unsuitable for a particular method of administration, e.g., peptides are generally unsuitable active agents for oral compositions as they tend to be quickly degraded by proteases in the alimentary canal. Mimetic design, synthesis, and testing are generally used to avoid large-scale screening of molecules for a target property.

[0271] There are several steps commonly taken in the design of a mimetic from a compound having a given target property. First, the particular parts of the compound that are critical and/or important in determining the target property are determined. In the case of a peptide, this can be done by systematically varying the amino acid residues in the peptide (e.g., by substituting each residue in turn). These parts or residues constituting the active region of the compound are known as its “pharmacophore”.

[0272] Once the pharmacophore has been found, its structure is modeled according to its physical properties (e.g., stereochemistry, bonding, size, and/or charge), using data from a range of sources (e.g., spectroscopic techniques, X-ray diffraction data, and NMR). Computational analysis, similarity mapping (which models the charge and/or volume of a pharmacophore, rather than the bonding between atoms), and other techniques can be used in this modeling process.

[0273] In a variant of this approach, the three dimensional structure of the ligand and its binding partner are modeled. This can be especially useful where the ligand and/or binding partner change conformation on binding, allowing the model to take account of this in the design of the mimetic.

[0274] A template molecule is then selected, and chemical groups that mimic the pharmacophore can be grafted onto the template. The template molecule and the chemical groups grafted on to it can conveniently be selected so that the mimetic is easy to synthesize, is likely to be pharmacologically acceptable, does not degrade in vivo, and retains the biological activity of the lead compound. The mimetics found are then screened to ascertain the extent they exhibit the target property, or to what extent they inhibit it. Further optimization or modification can then be carried out to arrive at one or more final mimetics for in vivo or clinical testing.

[0275] This invention provides specific IR and IGF-1R amino acid sequences that function as either agonists or antagonists at IR and/or IGF-1R. Additional sequences may be obtained in accordance with the procedures described herein.

[0276] Use of the Peptides Provided by this Invention

[0277] The IR and IGF-1R agonist and antagonist peptides provided by this invention are useful as lead compounds for identifying other more potent or selective therapeutics, assay reagents for identifying other useful ligands by, for example, competition screening assays, as research tools for further analysis of IR and IGF-1R, and as therapeutics in pharmaceutical compositions. In one embodiment, one or more of the disclosed peptides can be provided as components in a kit for identifying other ligands (e.g., small, organic molecules) that bind to IR or IGF-1R. Such kits may also comprise IR or IGF-1R, or functional fragments thereof. The peptide and receptor components of the kit may be labeled (e.g., by radioisotopes, fluorescent molecules, chemiluminescent molecules, enzymes or other labels), or may be unlabeled and labeling reagents may be provided. The kits may also contain peripheral reagents such as buffers, stabilizers, etc. Instructions for use can also be provided.

[0278] In another embodiment, the peptide sequences provided by this invention can be used to design secondary peptide libraries, which are derived from the peptide sequences, and include members that bind to Site 1 and/or Site 2 of IR or IGF-1R. Such libraries can be used to identify sequence variants that increase or modulate the binding and/or activity of the original peptide at IR or IGF-1R, as described in the related applications of Beasley et al. International Application PCT/US00/08528, filed Mar. 29, 2000, and Beasley et al., U.S. application Ser. No. 09/538,038, filed Mar. 29, 2000, in accordance with well-established techniques.

[0279] IR agonist amino acid sequences provided by this invention are useful as insulin analogs and may therefore be developed as treatments for diabetes or other diseases associated with a decreased response or production of insulin. For use as an insulin supplement or replacement, non-limiting examples of amino acid sequences include D117/H2C: FHENFYDWFVRQVSK (SEQ ID NO:1780); D117/H2C minus terminal lysine: FHENFYDWFVRQVS (SEQ ID NO:1557); D118: DYKDFYDAIQLVRSARAGGTRDKK (SEQ ID NO:1781); D118 minus FLAG® tag and terminal lysines: FYDAIQLVRSARAGGTRD (SEQ ID NO:1782); D119: KDRAFYNGLRDLVGAVYGAWDKK (SEQ ID NO:1733); D119 minus terminal lysines: KDRAFYNGLRDLVGAVYGAWD (SEQ ID NO:residues 1-21 of SEQ ID NO: 1733); D116/JBA5: DYKDLCQSWGVRIGWLAGLCPKK (SEQ ID NO:1541); D116/JBA5 minus FLAG® tag and terminal lysines: LCQSWGVRIGWLAGLCP (SEQ ID NO:1542); D113/H2: DYKDVTFTSAVFHENFYDWFVRQVSKK (SEQ ID NO:1783); D113/H2 minus FLAG® tag and terminal lysines: VTFTSAVFHENFYDWFVRQVS (SEQ ID NO:1784); and S175: GRVDWLQRNANFYDWFVAELG (SEQ ID NO:1560). Preferred peptide dimer sequences are represented by S325, S332, S333, S335, S337, S353, S374-S376, S378, S379, S381, S414, S415, and S418 (see Table 7). Other preferred dimers sequences are represented by S455, S457, S458, S467, S468, S471, S499, S510, S518, S519, and S520 sequences (see Table 7). Especially preferred are the S519 dimer sequence, which shows in vitro and in vivo activity comparable to insulin (see FIGS. 31A-C, 32A-B, and 33), S557 (see, e.g., FIG. 55) and S597 (see, e.g., FIGS. 54-56).

[0280] IGF-1R antagonist amino acid sequences provided by this invention are useful as treatments for cancers, including, but not limited to, breast, prostate, colorectal, and ovarian cancers. Human and breast cancers are responsible for over 40,000 deaths per year, as present treatments such as surgery, chemotherapy, radiation therapy, and immunotherapy show limited success. The IGF-1R antagonist amino acid sequences disclosed herein are also useful for the treatment or prevention of diabetic retinopathy. Recent reports have shown that a previously identified IGF-1R antagonist can suppress retinal neovascularization, which causes diabetic retinopathy (Smith et al., 1999, Nat. Med. 5:1390-1395).

[0281] IGF-1R agonist amino acid sequences provided by this invention are useful for development as treatments for neurological disorders, including stroke and diabetic neuropathy. Reports of several different groups implicate IGF-1R in the reduction of global brain ischemia, and support the use of IGF-1 for the treatment of diabetic neuropathy (reviewed in Auer et al., 1998, Neurology 51:S39-S43; Apfel, 1999, Am. J. Med. 107:34 S-42S).

[0282] I. Modification of Peptides

[0283] The peptides of the invention may be subjected to one or more modifications known in the art, which may be useful for manipulating storage stability, pharmacokinetics, and/or any aspect of the bioactivity of the peptide, such as, e.g., potency, selectivity, and drug interaction. Chemical modification to which the peptides may be subjected includes, without limitation, the conjugation to a peptide of one or more of polyethylene glycol (PEG), monomethoxy-polyethylene glycol, dextran, poly-(N-vinyl pyrrolidone) polyethylene glycol, propylene glycol homopolymers, a polypropylene oxide/ethylene oxide co-polymer, polypropylene glycol, polyoxyethylated polyols (e.g., glycerol) and polyvinyl alcohol, colominic acids or other carbohydrate based polymers, polymers of amino acids, and biotin derivatives. PEG conjugation of proteins at Cys residues is disclosed, e.g., in Goodson, R. J. & Katre, N. V. (1990) Bio/Technology 8, 343 and Kogan, T. P. (1992) Synthetic Comm. 22, 2417.

[0284] Other useful modifications include, without limitation, acylation, using methods and compositions such as described in, e.g., U.S. Pat. No. 6,251,856, and WO 00/55119.

[0285] J. Therapeutic Administration

[0286] The peptides of the present invention may be administered individually or in combination with other pharmacologically active agents. It will be understood that such combination therapy encompasses different therapeutic regimens, including, without limitation, administration of multiple agents together in a single dosage form or in distinct, individual dosage forms. If the agents are present in different dosage forms, administration may be simultaneous or near-simultaneous or may follow any predetermined regimen that encompasses administration of the different agents.

[0287] For example, when used to treat diabetes or other diseases or syndromes associated with a decreased response or production of insulin, hyperlipidemia, obesity, appetite-related syndromes, and the like, the peptides of the invention may be advantageously administered in a combination treatment regimen with one or more agents, including, without limitation, insulin, insulin analogues, insulin derivatives, glucagon-like peptide-1 or -2 (GLP-1, GLP-2), derivatives or analogues of GLP-1 or GLP-2 (such as are disclosed, e.g., in WO 00/55119). It will be understood that an “analogue” of insulin, GLP-1, or GLP-2 as used herein refers to a peptide containing one or more amino acid substitutions relative to the native sequence of insulin, GLP-1, or GLP-2, as applicable; and “derivative” of insulin, GLP-1, or GLP-2 as used herein refers to a native or analogue insulin, GLP-1, or GLP-2 peptide that has undergone one or more additional chemical modifications of the amino acid sequence, in particular relative to the natural sequence. Insulin derivatives and analogues are disclosed, e.g., in U.S. Pat. Nos. 5,656,722, 5,750,497, 6,251,856, and 6,268,335. In some embodiments, the combination agent is one of LyS^{B29}(ε-myristoyl)des(B30) human insulin, LyS^{B29}(ε-tetradecanoyl)des(B30) human insulin and B²⁹-N^{ε}-(N-lithocolyl-γ-glutamyl)-des(B30) human insulin. Also suitable for combination therapy are non-peptide antihyperglycemic agents, antihyperlipidemic agents, and the like such as those well-known in the art.

[0288] In one embodiment, the invention encompasses methods of treating diabetes or related syndromes comprising administering a first amount of peptide S597 or peptide S557 and a second amount of a long-acting insulin analogue, such as, e.g., Lys^{B29}(ε-myristoyl)des(B30) human insulin, LyS^{B29}(ε-tetradecanoyl)des(B30) human insulin. or B²⁹-N^{ε}-(N-lithocolyl-γ-glutamyl)-des(B30) human insulin, wherein the first and second amounts together are effective for treating the syndrome. As used herein, a long-acting insulin analogue is one that exhibits a protracted profile of action relative to native human insulin, as disclosed, e.g., in U.S. Pat. No. 6,451,970.

[0289] K. Methods of Administration

[0290] The amino acid sequences of this invention may be administered as pharmaceutical compositions comprising standard carriers known in the art for delivering proteins and peptides and by gene therapy. Preferably, a pharmaceutical composition includes, in admixture, a pharmaceutically (i.e., physiologically) acceptable carrier, excipient, or diluent, and one or more of an IR or IGF-1R agonist or antagonist peptide, as an active ingredient. The preparation of pharmaceutical compositions that contain peptides as active ingredients is well understood in the art. Typically, such compositions are prepared as injectables, either as liquid solutions or suspensions, however, solid forms suitable for solution in, or suspension in, liquid prior to injection can also be prepared. The preparation can also be emulsified. The active therapeutic ingredient is often mixed with excipients that are pharmaceutically (i.e., physiologically) acceptable and compatible with the active ingredient. Suitable excipients are, for example, water, saline, dextrose, glycerol, ethanol, or the like and combinations thereof. In addition, if desired, the composition can contain minor amounts of auxiliary substances such as wetting or emulsifying agents, pH-buffering agents, which enhance the effectiveness of the active ingredient.

[0291] An IR or IGF-1R agonist or antagonist peptide can be formulated into a pharmaceutical composition as neutralized physiologically acceptable salt forms. Suitable salts include the acid addition salts (i.e., formed with the free amino groups of the peptide molecule) and which are formed with inorganic acids such as, for example, hydrochloric or phosphoric acids, or such organic acids as acetic, oxalic, tartaric, mandelic, and the like. Salts formed from the free carboxyl groups can also be derived from inorganic bases such as, for example, sodium, potassium, ammonium, calcium, or ferric hydroxides, and such organic bases as isopropylamine, trimethylamine, 2-ethylamino ethanol, histidine, procaine, and the like.

[0292] The pharmaceutical compositions can be administered systemically by oral or parenteral routes. Non-limiting parenteral routes of administration include subcutaneous, intramuscular, intraperitoneal, intravenous, transdermal, inhalation, intranasal, intra-arterial, intrathecal, enteral, sublingual, or rectal. Due to the labile nature of the amino acid sequences parenteral administration is preferred. Preferred modes of administration include aerosols for nasal or bronchial absorption; suspensions for intravenous, intramuscular, intrasternal or subcutaneous, injection; and compounds for oral administration.

[0293] Intravenous administration, for example, can be performed by injection of a unit dose. The term “unit dose” when used in reference to a pharmaceutical composition of the present invention refers to physically discrete units suitable as unitary dosage for humans, each unit containing a predetermined quantity of active material calculated to produce the desired therapeutic effect in association with the required diluent; i.e., liquid used to dilute a concentrated or pure substance (either liquid or solid), making that substance the correct (diluted) concentration for use. For injectable administration, the composition is in sterile solution or suspension or may be emulsified in pharmaceutically- and physiologically-acceptable aqueous or oleaginous vehicles, which may contain preservatives, stabilizers, and material for rendering the solution or suspension isotonic with body fluids (i.e., blood) of the recipient.

[0294] Excipients suitable for use are water, phosphate buffered saline, pH 7.4, 0.15 M aqueous sodium chloride solution, dextrose, glycerol, dilute ethanol, and the like, and mixtures thereof. Illustrative stabilizers are polyethylene glycol, proteins, saccharides, amino acids, inorganic acids, and organic acids, which may be used either on their own or as admixtures. The amounts or quantities, as well as routes of administration, used are determined on an individual basis, and correspond to the amounts used in similar types of applications or indications known to those of skill in the art.

[0295] Pharmaceutical compositions are administered in a manner compatible with the dosage formulation, and in a therapeutically effective amount. The quantity to be administered depends on the subject to be treated, capacity of the subject's immune system to utilize the active ingredient, and degree of modulation of IR or IGF-1R activity desired. Precise amounts of active ingredient required to be administered depend on the judgment of the practitioner and are specific for each individual. However, suitable dosages may range from about 10 to 200 nmol active peptide per kilogram body weight of individual per day and depend on the route of administration. Suitable regimes for initial administration and booster shots are also variable, but are typified by an initial administration followed by repeated doses at one or more hour intervals by a subsequent injection or other administration. Alternatively, continuous intravenous infusions sufficient to maintain picomolar concentrations (e.g., approximately 1 μM to approximately 10 nM) in the blood are contemplated. An exemplary formulation comprises the IR or IGF-1R agonist or antagonist peptide in a mixture with sodium busulfite USP (3.2 mg/ml); disodium edetate USP (0.1 mg/ml); and water for injection q.s.a.d. (1 ml).

[0296] Further guidance in preparing pharmaceutical formulations can be found in, e.g., Gilman et al. (eds), 1990, Goodman and Gilman's: The Pharmacological Basis of Therapeutics, 8th ed., Pergamon Press; and Remington's Pharmaceutical Sciences, 17th ed., 1990, Mack Publishing Co., Easton, Pa.; Avis et al. (eds), 1993, Pharmaceutical Dosage Forms: Parenteral Medications, Dekker, New York; Lieberman et al. (eds), 1990, Pharmaceutical Dosage Forms: Disperse Systems, Dekker, New York.

[0297] The present invention further contemplates compositions comprising an IR or IGF-1R agonist or antagonist peptide, and a physiologically acceptable carrier, excipient, or diluent as described in detail herein.

[0298] The constructs as described herein may also be used in gene transfer and gene therapy methods to allow the expression of one or more amino acid sequences of the present invention. The amino acid sequences of the present invention can be used for gene therapy and thereby provide an alternative method of treating diabetes which does not rely on the administration or expression of insulin. Expressing insulin for use in gene therapy requires the expression of a precursor product, which must then undergo processing including cleavage and disulfide bond formation to form the active product. The amino acid sequences of this invention, which possess activity, are relatively small, and thus do not require the complex processing steps to become active. Accordingly, these sequences provide a more suitable product for gene therapy.

[0299] Gene transfer systems known in the art may be useful in the practice of the gene therapy methods of the present invention. These include viral and non-viral transfer methods. A number of viruses have been used as gene transfer vectors, including polyoma, i.e., SV40 (Madzak et al., 1992, J. Gen. Virol., 73:1533-1536), adenovirus (Berkner, 1992, Curr. Top. Microbiol. Immunol., 158:39-6; Berkner et al., 1988, Bio Techniques, 6:616-629; Gorziglia et al., 1992, J. Virol., 66:4407-4412; Quantin et al., 1992, Proc. Natl. Acad. Sci. USA, 89:2581-2584; Rosenfeld et al., 1992, Cell, 68:143-155; Wilkinson et al., 1992, Nucl. Acids Res., 20:2233-2239; Stratford-Perricaudet et al., 1990, Hum. Gene Ther., 1:241-256), vaccinia virus (Mackett et al., 1992, Biotechnology, 24:495-499), adeno-associated virus (Muzyczka, 1992, Curr. Top. Microbiol. Immunol. 158:91-123; Ohi et al., 1990, Gene, 89:279-282), herpes viruses including HSV and EBV (Margolskee, 1992, Curr. Top. Microbiol. Immunol. 158:67-90; Johnson et al., 1992, J. Virol., 66:2952-2965; Fink et al., 1992, Hum. Gene Ther. 3:11-19; Breakfield et al., 1987, Mol. Neurobiol., 1:337-371; Fresse et al., 1990, Biochem. Pharmacol. 40:2189-2199), and retroviruses of avian (Brandyopadhyay et al., 1984, Mol. Cell. Biol., 4:749-754; Petropouplos et al., 1992, J. Virol., 66:3391-3397), murine (Miller, 1992, Curr. Top. Microbiol. Immunol. 158:1-24; Miller et al., 1985, Mol. Cell. Biol., 5:431-437; Sorge et al., 1984, Mol. Cell. Biol., 4:1730-1737; Mann et al., 1985, J. Virol., 54:401-407), and human origin (Page et al., 1990, J. Virol., 64:5370-5276; Buchschalcher et al., 1992, J. Virol., 66:2731-2739). Most human gene therapy protocols have been based on disabled murine retroviruses.

[0300] Non-viral gene transfer methods known in the art include chemical techniques such as calcium phosphate coprecipitation (Graham et al., 1973, Virology, 52:456-467; Pellicer et al., 1980, Science, 209:1414-1422), mechanical techniques, for example microinjection (Anderson et al., 1980, Proc. Natl. Acad. Sci. USA, 77:5399-5403; Gordon et al., 1980, Proc. Natl. Acad. Sci. USA, 77:7380-7384; Brinster et al., 1981, Cell, 27:223-231; Constantini et al., 1981, Nature, 294:92-94), membrane fusion-mediated transfer via liposomes (Felgner et al., 1987, Proc. Natl. Acad. Sci. USA, 84:7413-7417; Wang et al., 1989, Biochemistry, 28:9508-9514; Kaneda et al., 1989, J. Biol. Chem., 264:12126-12129; Stewart et al., 1992, Hum. Gene Ther. 3:267-275; Nabel et al., 1990, Science, 249:1285-1288; Lim et al., 1992, Circulation, 83:2007-2011; U.S. Pat. Nos. 5,283,185 and 5,795,587), and direct DNA uptake and receptor-mediated DNA transfer (Wolff et al., 1990, Science, 247:1465-1468; Wu et al., 1991, BioTechniques, 11:474-485; Zenke et al., 1990, Proc. Natl. Acad. Sci. USA, 87:3655-3659; Wu et al., 1989, J. Biol. Chem., 264:16985-16987; Wolff et al., 1991, BioTechniques, 11:474-485; Wagner et al., 1991, Proc. Natl. Acad. Sci. USA, 88:4255-4259; Cotten et al., 1990, Proc. Natl. Acad. Sci. USA, 87:4033-4037; Curiel et al., 1991, Proc. Natl. Acad. Sci. USA, 88:8850-8854; Curiel et al., 1991, Hum. Gene Ther. 3:147-154).

[0301] Many types of cells and cell lines (e.g., primary cell lines or established cell lines) and tissues are capable of being stably transfected by or receiving the constructs of the invention. Examples of cells that may be used include, but are not limited to, stem cells, B lymphocytes, T lymphocytes, macrophages, other white blood lymphocytes (e.g., myelocytes, macrophages, or monocytes), immune system cells of different developmental stages, erythroid lineage cells, pancreatic cells, lung cells, muscle cells, liver cells, fat cells, neuronal cells, glial cells, other brain cells, transformed cells of various cell lineages corresponding to normal cell counterparts (e.g., K562, HEL, HL60, and MEL cells), and established or otherwise transformed cells lines derived from all of the foregoing. In addition, the constructs of the present invention may be transferred by various means directly into tissues, where they would stably integrate into the cells comprising the tissues. Further, the constructs containing the DNA sequences of the peptides of the invention can be introduced into primary cells at various stages of development, including the embryonic and fetal stages, so as to effect gene therapy at early stages of development.

[0302] In one approach, plasmid DNA is complexed with a polylysine-conjugated antibody specific to the adenovirus hexon protein, and the resulting complex is bound to an adenovirus vector. The trimolecular complex is then used to infect cells. The adenovirus vector permits efficient binding, internalization, and degradation of the endosome before the coupled DNA is damaged.

[0303] In another approach, liposome/DNA is used to mediate direct in vivo gene transfer. While in standard liposome preparations the gene transfer process is non-specific, localized in vivo uptake and expression have been reported in tumor deposits, for example, following direct in situ administration (Nabel, 1992, Hum. Gene Ther. 3:399-410).

[0304] Suitable gene transfer vectors possess a promoter sequence, preferably a promoter that is cell-specific and placed upstream of the sequence to be expressed. The vectors may also contain, optionally, one or more expressible marker genes for expression as an indication of successful transfection and expression of the nucleic acid sequences contained in the vector. In addition, vectors can be optimized to minimize undesired immunogenicity and maximize long-term expression of the desired gene product(s) (see Nabe, 1999, Proc. Natl. Acad. Sci. USA 96:324-326). Moreover, vectors can be chosen based on cell-type that is targeted for treatment.

[0305] Illustrative examples of vehicles or vector constructs for transfection or infection of the host cells include replication-defective viral vectors, DNA virus or RNA virus (retrovirus) vectors, such as adenovirus, herpes simplex virus and adeno-associated viral vectors. Adeno-associated virus vectors are single stranded and allow the efficient delivery of multiple copies of nucleic acid to the cell's nucleus. Preferred are adenovirus vectors. The vectors will normally be substantially free of any prokaryotic DNA and may comprise a number of different functional nucleic acid sequences. An example of such functional sequences may be a DNA region comprising transcriptional and translational initiation and termination regulatory sequences, including promoters (e.g., strong promoters, inducible promoters, and the like) and enhancers which are active in the host cells. Also included as part of the functional sequences is an open reading frame (polynucleotide sequence) encoding a protein of interest. Flanking sequences may also be included for site-directed integration. In some situations, the 5′-flanking sequence will allow homologous recombination, thus changing the nature of the transcriptional initiation region, so as to provide for inducible or non-inducible transcription to increase or decrease the level of transcription, as an example.

[0306] In general, the encoded and expressed peptide may be intracellular, i.e., retained in the cytoplasm, nucleus, or in an organelle, or may be secreted by the cell. For secretion, a signal sequence may be fused to the peptide sequence. As previously mentioned, a marker may be present for selection of cells containing the vector construct. The marker may be an inducible or non-inducible gene and will generally allow for positive selection under induction, or without induction, respectively. Examples of marker genes include neomycin, dihydrofolate reductase, glutamine synthetase, and the like. The vector employed will generally also include an origin of replication and other genes that are necessary for replication in the host cells, as routinely employed by those having skill in the art. As an example, the replication system comprising the origin of replication and any proteins associated with replication encoded by a particular virus may be included as part of the construct. The replication system must be selected so that the genes encoding products necessary for replication do not ultimately transform the cells. Such replication systems are represented by replication-defective adenovirus (see G. Acsadi et al., 1994, Hum. Mol. Genet. 3:579-584) and by Epstein-Barr virus. Examples of replication defective vectors, particularly, retroviral vectors that are replication defective, are BAG, (see Price et al., 1987, Proc. Natl. Acad. Sci. USA, 84:156; Sanes et al., 1986, EMBO J., 5:3133). It will be understood that the final gene construct may contain one or more genes of interest, for example, a gene encoding a bioactive metabolic molecule. In addition, cDNA, synthetically produced DNA or chromosomal DNA may be employed utilizing methods and protocols known and practiced by those having skill in the art.

[0307] According to one approach for gene therapy, a vector encoding an IR or IGF-1R agonist or antagonist peptide is directly injected into the recipient cells (in vivo gene therapy). Alternatively, cells from the intended recipients are explanted, genetically modified to encode an IR or IGF-1R agonist or antagonist peptide, and reimplanted into the donor (ex vivo gene therapy). An ex vivo approach provides the advantage of efficient viral gene transfer, which is superior to in vivo gene transfer approaches. In accordance with ex vivo gene therapy, the host cells are first transfected with engineered vectors containing at least one gene encoding an IR or IGF-1R agonist or antagonist peptide, suspended in a physiologically acceptable carrier or excipient such as saline or phosphate buffered saline, and the like, and then administered to the host or host cells. The desired gene product is expressed by the injected cells, which thus introduce the gene product into the host. The introduced gene products can thereby be utilized to treat or ameliorate a disorder that is related to altered insulin or IGF-1 levels (e.g., diabetes).

[0308] The described constructs may be administered in the form of a pharmaceutical preparation or composition containing a pharmaceutically acceptable carrier and a physiological excipient, in which preparation the vector may be a viral vector construct, or the like, to target the cells, tissues, or organs of the recipient organism of interest, including human and non-human mammals. The composition may be formed by dispersing the components in a suitable pharmaceutically acceptable liquid or solution such as sterile physiological saline or other injectable aqueous liquids. The amounts of the components to be used in such compositions may be routinely determined by those having skill in the art. The compositions may be administered by parenteral routes of injection, including subcutaneous, intravenous, intramuscular, and intrasternal.

### EXAMPLES

[0309] The examples as set forth herein are meant to exemplify the various aspects of the present invention and are not intended to limit the invention in any way.

[0310] The following materials were used in the examples described below. Soluble IGF-1R was obtained from R&D Systems (Minneapolis, Minn.; Cat. # 391-GR/CF). Insulin receptor was prepared according to Bass et al., 1996. The insulin was either from Sigma (St. Louis, Mo.; Cat. # I-0259) or Boehringer. The IGF-1 was from PeproTech (Cat. # 100-11). All synthetic peptides were synthesized by Novo Nordisk, AnaSpec, Inc. (San Jose, Calif.), PeptioGenics (Livermore, Calif.), or Research Genetics (Huntsville, Ala.) at >80% purity. The Maxisorb Plates were from NUNC via Fisher (Cat. # 12565347). The HRP/Anti-M13 conjugate was from Pharmacia (Cat. # 27-9421-01). The ABTS solution was from BioF/X (Cat. # ABTS-0100-04).

### Example 1

### Monomer and Dimer Peptides

[0311] A. Cloning

[0312] Monomer and dimer peptides were constructed and expressed as protein fusions to a chitin binding domain (CBD) using the pTYB2 vector from the IMPACT™-CN system (New England Biolabs (NEB), Beverly, Mass.). The pTYB2 vector encodes a protein-splicing element (termed intein), which initiates self-cleavage upon the addition of DTT. The intein self-cleavage separates the dimer from the affinity tag, to allow purification.

[0313] In the pTYB2 construct, the C-terminus of the peptide sequence was fused to the N-terminus of the intein/CBD sequence. Two peptide-flanking epitope tags were included: a shortened-FLAG® at the N-terminus and E-Tag at the C-terminus. This fusion was generated by ligating a vector fragment encoding the intein/CBD with a PCR product encoding the peptide of interest.

[0314] The vector fragment was obtained by digesting at appropriate restriction sites the pTBY2 vector. The digested DNA fragment was resolved on a 1% agarose gel, excised, and purified by QIAEXII (QIAGEN, Valencia, Calif.). To obtain the PCR product of the target proteins, primers were synthesized which anneal to appropriate sequences. The vector and insert were ligated overnight at 15° C. The ligation product was purified using QIAquick spin columns (QIAGEN) and electroporations were performed at 1500 V in an electroporation cuvette (0.1 mm gap; 0.5 ml volume) containing 10 ng of DNA and 40 μl of E. coli strain BL21.

[0315] Immediately following electroporation, 1 ml of pre-warmed (40° C.) 2xYT medium containing 2% glucose (2xYT-G) was added to the transformants. The transformants were grown at 37° C. for 1 h, and then plated onto 2xYT-AG plates and incubated overnight at 37° C. Individual colonies were isolated and used to innoculate 2xYT-G. The cultures were grown overnight at 37° C. Plasmid DNA was isolated from the cultures and sequencing was performed to confirm that the correct construct was obtained.

[0316] Small-Scale Expression of Peptide-CBD Fusion Proteins

[0317] E. coli ER2566 (New England Biolabs) containing plasmids encoding peptide-CBD fusion proteins were grown in 2xYT-AG at 37° C. overnight, with agitation (250 rpm). The following day, the cultures were used to inoculate media (2×YT-G) to obtain an OD₆₀₀ of 0.1. Upon reaching an OD₆₀₀ of 0.6, expression of the fusion protein was induced by the addition of IPTG (isopropyl-β-D-thiogalactopyranoside) to a final concentration of 0.3 mM. Cells were grown for 3 h. Following this, cells were pelleted by centrifugation and the cell pellets were analyzed by SDS-PAGE electrophoresis. Production of the correct molecular weight fusion proteins was confirmed by Western blot analysis using the monoclonal antibody anti-E-Tag-HRP conjugate (Amersham Pharmacia).

[0318] Large-Scale Expression and Purification of Soluble Peptide-CBD Fusion Proteins

[0319] E. coli ER2566 carrying plasmids encoding the fusion proteins were grown in 2xYT-AG media at 37° C. for 8 h, with agitation (250 rpm). The cultures were back-diluted into to 2 L volumes of 2xYT-A to achieve an OD₆₀₀ of 0.1. Upon reaching an OD₆₀₀ of 0.5, IPTG was added to a final concentration of 0.3 mM. Cells were grown at 30° C. overnight. The next day cells were isolated by centrifugation. Samples of the cell pellet were analyzed by SDS-PAGE followed by the Western blot analysis using the mouse monoclonal antibody anti-E-Tag-HRP conjugate (Pharmacia) to visualize the expressed product.

[0320] Purification

[0321] The cell pellets were disrupted mechanically by sonication or chemically by treatment with the mild detergent. After removal of cell debris by centrifugation, the soluble proteins in the clarified lysate were prepared for chromatographic purification by dilution or dialysis into the appropriate starting buffer. The CBD fusions were purified by chitin affinity chromatography according to the manufacturer's instructions (New England Biolabs). The lysate was loaded onto a chitin affinity column and the column was washed with 10 volumes of column buffer. Three bed volumes of the DTT containing cleavage buffer were loaded onto the column and the column was incubated overnight. The next day, the target protein was eluted by continuing the flow of the cleavage buffer without DTT. The purified proteins were analyzed for purity and integrity by SDS-PAGE and Western blot analysis according to standard protocols.

### Example 2

### PEG-Based Dimer Peptides

[0322] A. Synthesis of the aldehyde containing peptide

[0323] The peptide was synthesized by stepwise solid phase synthesis on Rink amide Tentagel (0.21 mmol/g). Three equivalents of Fmoc-amino acids were used. The serine residue was introduced into the peptide by either coupling Fmoc-Ser(tBu)-OH to the N-terminal peptide or coupling Boc-Ser(tBu) to a selectively protected lysine side-chain. The peptide was then deprotected and cleaved from the resin by treatment with 95% TFA (trifluoroacetic acid; aq) containing TIS (triisopropylsilan). Periodate oxidation, using 2 equivalent of NalO₄ in 20% DMSO (dimethyl sulfoxide)-80% phosphate buffer pH 7.5 (45 μl/μmol peptide) for 5 min at room temperature (RT), converted the 2-amino alcohol moiety in an F-oxoacyl group. The peptide was purified immediately following oxidation.

[0324] B. Synthesis of the PEG-Based Dimer

[0325] The unprotected and oxidized peptide (4.2 equivalent) was dimerized on the dioxyamino-PEG (polyethylene glycol)-linker (1 equivalent) in 90% DMSO-10% 20 mM NaOAc buffer, pH 5.1 (4.2 μl/μmol peptide). The solution was left for 1 hr at 38° C. and the progress of the reaction was monitored by MALDI-MS (matrix-assisted laser desorption/ionization mass spectrometry). Following this, the crude dimer was purified by semi-preparative HPLC (high performance liquid chromatography).

[0326] The molecular weights and inter peptide distance of various linkers is shown in Table 3, below.

TABLE 3

| Structure | Number | MW | MW (—2H₂O) |
|---|---|---|---|
| [chemical structure] | 1 | 100.1 | 64.1 |
| [chemical structure] | 2 | 58.04 | 22.04 |
| [chemical structure] | 3 | 149.15 | 113.15 |
| [chemical structure] | 4 | 150.14 | 114.14 |
| [chemical structure] | 5 | 134.13 | 98.13 |
| [chemical structure] | 6 | 134.13 | 98.13 |
| [chemical structure] | 7 | 134.13 | 98.13 |
| [chemical structure] | 8 | 234.25 | 198.25 |
| [chemical structure] | 9 | 302.3 | 266.3 |
| [chemical structure] | 10 | 72.06 | 36.06 |
| [chemical structure] | 11 | 86.09 | 50.09 |
| [chemical structure] | 12 | 114.14 | 78.14 |
| [chemical structure] | 13 | 128.08 | 92.08 |
| [chemical structure] | 14 | 142.19 | 106.19 |
| (HCO)₄-(Lys)₂-Lys-Gly- | 15 | | |
| NH₂ | | | |
| [chemical structure] | 16 | 136.2 | 100.2 |
| [chemical structure] | 17 | 180.2 | 144.2 |
| [chemical structure] | 18 | 224.3 | 188.3 |
| [chemical structure] | 19 | 268.3 | 232.3 |
| [chemical structure] | 20 | 312.4 | 276.4 |
| [chemical structure] | 21 | 278.4 | 242.4 |
| [chemical structure] | 22 | 240.3 | 204.3 |
| [chemical structure] | 23 | 240.3 | 204.3 |
| [chemical structure] | 24 | 210.2 | 192.2 |

### Example 3

### Determination of Insulin Receptor Binding

[0327] IR was incubated with ¹²⁵I-labeled insulin at various concentrations of test substance and the K_{d} was calculated. According to this method, human insulin receptor (HIR) or human IGF-1 receptor (HIGF-1R) was purified from transfected cells after solubilization with Triton X-100. The assay buffer contained 100 mM HEPES (pH 7.8), 100 mM NaCl, 10 mM MgCl₂, 0.5% human serum albumin (HSA), 0.2% gammaglobulin and 0.025% Triton X-100. The receptor concentration was chosen to give 30-60% binding of 2000 cpm (3 pM) of its ¹²⁵I-labeled ligand (TyrA14-¹²⁵I-HI or Tyr31-¹²⁵I-IGF1) and a dilution series of the substances to be tested was added. After equilibration for 2 days at 4° C. each sample (200 μl) was precipitated by addition of 400 μl 25% PEG 6000, centrifuged, washed with 1 ml 15% PEG 6000, and counted in a gamma-counter.

[0328] The insulin/IGF-1 competition curve was fitted to a one-site binding model and the calculated parameters for receptor concentration, insulin affinity, and non-specific binding were used in calculating the binding constants of the test substances. Representative curves for insulin competition are shown in FIGS. 10A-10C; 11A-11D. Qualitative data are provided in Table 4, below.

[0329] Table 4 illustrates IR affinities for the RP9 monomer peptide and various RP9 monomer truncations. The results demonstrate that RP9 N-terminal sequence (GSLD; SEQ ID NO:1785) and C-terminal sequence (LGKK; SEQ ID NO:1786) can be deleted without substantially affecting HIR binding affinity (Table 4).

TABLE 4

| | SEQ | | | | |
|---|---|---|---|---|---|
| Pep- | ID | | Site | | HIR Kd |
| tide | NO: | Formula | IR | Sequence | (mol/l) |
| S386 | 1559 | 1 | 1 | GSLDESFYDWFERQLG | 3.2*10⁻⁷ |
| S395 | 1787 | 1 | 1 | GSLDESFYDWFERQL | 9.1 * 10⁻⁸ |
| S394 | 1788 | 1 | 1 | GSLDESFYDWFERQ | 8.1 * 10⁻⁸ |
| S396 | 1789 | 1 | 1 | GSLDESFYDWFER | >2 * 10⁻⁵ |
| S399 | 1790 | 1 | 1 | ESFYDWFERQL | 9.1 * 10⁻⁸ |
| S400 | 1791 | 1 | 1 | ESFYDWFERQ | 6.3 * 10⁻⁷ |

[0330] FIGS. 10A-10C demonstrate that Site 1-Site 2 heterodimer peptides 537, 538, and 539 bound to IR with substantially higher (several orders of magnitude) affinity than corresponding monomer (D117 and 540) and homodimer (521 and 535) peptides. FIGS. 11A-11D demonstrate that Site 1-Site 2 heterodimer peptides, 537 and 538, bound to IR with markedly higher affinity than the monomer peptide D117.

### Example 4

### Adipocyte Assay for Determination of Insulin Agonist Activity

[0331] Insulin increases uptake of ³H glucose into adipocytes and its conversion into lipid. Incorporation of ³H into the lipid phase was determined by partitioning of lipid phase into a scintillant mixture, which excludes water-soluble ³H products. The effect of compounds on the incorporation of ³H glucose at a sub-maximal insulin dose was determined, and the results expressed as increase relative to full insulin response. The method was adapted from Moody et al., 1974, Horm Metab Res. 6(1):12-6.

[0332] Mouse epididymal fat pads were dissected out, minced into digestion buffer (Krebs-Ringer 25 mM HEPES, 4% HSA, 1.1 mM glucose, 0.4 mg/ml Collagenase Type 1, pH 7.4), and digested for up to 1.5 h at 36.5° C. After filtration, washing (Krebs-Ringer HEPES, 1% HSA), and resuspension in assay buffer (Krebs-Ringer HEPES, 1% HSA), free fat cells were pipetted into 96-well Picoplates (Packard), containing test solution and approximately an ED₂₀ insulin.

[0333] The assay was started by addition of ³H glucose (Amersham TRK 239), in a final concentration of 0.45 mM glucose. The assay was incubated for 2 h, 36.5° C., in a Labshaker incubation tower, 400 rpm, then terminated by the addition of Permablend/Toluene scintillant (or equivalent), and the plates sealed, before standing for at least 1 h and detection in a Packard Top Counter or equivalent. A full insulin standard curve (8 dose) was run as control on each plate.

[0334] Data are presented graphically, as effect of compound on an (approximate) ED₂₀ insulin response, with data normalized to a full insulin response. The assay can also be run at basal or maximal insulin concentration. Representative dose-response curves for insulin and IGF-1 are shown in FIGS. 12-18. Qualitative data are shown in Tables 5-7.

[0335] In free fat cell (FFC) assays, truncated synthetic RP9 monomer peptides S390 and S394 showed potency similar to full-length RP9 monomer peptides (FIGS. 12A-12D). Truncated synthetic RP9 homodimer peptides S415 and S417 were highly potent in FFC assays, but less potent than full-length RP9 homodimer peptides (FIGS. 13A-13C; compare to peptides 521 and 535, described below). The potency of recombinant RP9 homodimer peptides 521 and 535 in FFC assays is shown in FIGS. 14A-14C. The curves are flattened, suggesting that the binding mechanism may not be mediated by simple intramolecular binding (FIGS. 14A-14C).

[0336] Results further indicated that synthetic RP9 homodimer peptides S337 and S374 showed increased HIR biding affinity and increased potency in FFC assays compared to synthetic RP9 monomer, S371 (Table 5). Similarly, synthetic RP9 homodimer peptides S314 and S317 showed increased HIR binding affinity and increased potency in FFC assays compared to synthetic RP9 monomer, S371, and various RP9 truncations (Table 6).

TABLE 5

| | SEQ | | | Monomer | | | |
|---|---|---|---|---|---|---|---|
| | ID | | Site | or | | HIR K_{d} | |
| Pep. | NO: | Formula | IR | Dimer | Sequence | (mol/l) | FFC |
| S371 | 1558 | 1 | 1 | M (RP9) | GSLDESFYDWFERQLGKK | 6.3 * 10⁻⁷ | + |
| S337 | 1792 | 1-1 | 1-1 | D, C-Term 23 | (GSLDESFYDWFERQLGKK-Lig)₂-23 | 1.1 * 10⁻⁸ | +++++ |
| S374 | 1793 | 1-1 | 1-1 | D, N-Term 17 | 17-(GSLDESFYDWFERQLGKK)₂ | 1.8 * 10⁻⁷ | ++++ |

M = monomer; D = dimer; C-Term = C-terminal linker (C-C); N-Term = N-terminal linker (N-N); 23 and 17 represent specific chemical linkers (see Table 3); For FFC: 0 is no effect, + is agonist, − is antagonist.

[0337] TABLE 6

| | SEQ | | | | Mon. | | |
|---|---|---|---|---|---|---|---|
| | ID | | Site | or | | HIR K_{d} | |
| Peptide | NO: | Form. | IR | Dimer | Sequence | (mol/l) | FFC |
| S371 | 1558 | 1 | 1 | M | GSLDESFYDWFERQLGKK | 6.3 * 10⁻⁷ | + |
| (RP9) | | | | | | | |
| S395 | 1787 | 1 | 1 | M | GSLDESFYDWFERQL | 9.1 * 10⁻⁸ | + |
| S394 | 1788 | 1 | 1 | M | GSLDESFYDWFERQ | 8.1 * 10⁻⁸ | ++ |
| S396 | 1789 | 1 | 1 | M | GSLDESFYDWFER | >2 * 10⁻⁵ | 0 |
| S390 | 1794 | 1 | 1 | M | ESFYDWFERQLG | 6.2 * 10⁻⁷ | + |
| S399 | 1790 | 1 | 1 | M | ESFYDWFERQL | 9.1 * 10⁻⁸ | ++ |
| S400 | 1791 | 1 | 1 | M | ESFYDWFERQ | 6.3 * 10⁻⁷ | 0 |
| S415 | 1795 | 1-1 | 1-1 | D; C-Term | (ESFYDWFERQLGK)₂-23 | 1.0 * 10⁻⁷ | ++++ |
| S417 | 1796 | 1-1 | 1-1 | D; N-Term | 23-(ESFYDWFERQLG)₂ | 9.2 * 10⁻⁷ | +++ |

M = monomer; D = dimer; C-Term = C-terminal linker (C-C); N-Term = N-terminal linker (N-N); 23 represents a specific chemical linker (see Table 3); For FFC: 0 is no effect, + is agonist, − is antagonist; Form. = formula; Mon. = monomer;

[0338] Site 1-Site 2 dimer peptides 537 and 538 were inactive in the FFC assays using the standard concentration of insulin (FIGS. 15A-15C). However, Site 1-Site 2 dimer peptides 537 and 538 were antagonists in the FFC assay in the presence of a stimulating concentration of insulin (FIGS. 16A-16C). In contrast, Site 2-Site 1 dimer peptide 539 was a full agonist in the FFC assay, with a slope similar to that of insulin (FIGS. 17A-17B).

[0339] Additional experiments confirmed that FFC assay activity of Site 1-Site 2 dimer peptides was affected by the orientation of the monomer subunits (FIGS. 18A-18D). In particular, dimer peptides comprising Site 1 (S372 or S373) and Site 2 (S451 or S452) monomer subunits exhibited antagonist activity in the Site 1-Site 2 orientation (C—N linkage) (dimer peptide S453); moderate levels of agonist activity in the Site 1-Site 2 orientation (N—N or C—C linkage) (dimer peptides S454 and S456); and high levels of agonist activity in the Site 2-Site 1 orientation (C—N linkage) (dimer peptide S455) (FIGS. 18A-18D).

[0340] Table 7, below, shows the HIR binding affinity and FFC assay potency of various synthetic peptides, including Site 1-Site 1 dimer peptides S325, S329, S332; S333, S334, S335, S336, S337, S349, S350, S351, S352, S353, S354, S361, S362, S363, S374, S375, S376, S378, S379, S380, S381, S414, S415, S416, S417,S418, S420, and S424. These synthetic dimer peptides exhibited properties comparable to dimer peptides 521 and 535, regardless of the orientation of the monomer subunits. In particular, synthetic Site 1-Site 2 dimer peptides S425, S453, and S459 exhibited antagonist properties comparable to those of the Site 1-Site 2 dimer peptides 537 and 538. Synthetic Site 1-Site 2 dimer peptides S455, S457, and S458 exhibited agonist properties comparable to the dimer peptide 539. Synthetic Site 1-Site 2 dimer peptides S436, S437, S438, S454, S456 act as partial agonists in the FFC assay (i.e., the peptides exhibit a maximal response of less than 100% that of insulin), which is shown in the table as “++” and “+++”.

[0341] Table 7 also shows properties of truncated monomer and dimer peptides, and thereby indicates which N- or C-terminal residues can be deleted without substantial loss of HIR binding affinity (e.g., see synthetic peptides S386 through S392, S394 through S403, and S436 through S445). Notably, certain Site 2-Site 1 dimers show IR affinities of 2*10⁻¹¹ (see, e.g., S519 and S520). These peptides are also very potent in the fat cell assay (FIGS. 31A-31B) and even more potent in the HIR kinase assay (FIGS. 32A-32B) (kinase assay described below).

TABLE 7

| | SEQ | | | | | | |
|---|---|---|---|---|---|---|---|
| | ID | | | | | HIR Kd | |
| Peptide | NO: | Formula | Linkage | SiteIR | Sequence | (mol/l) | FFC |
| S105 | 1797 | F1 | - | 1 | FHENFYDWFVRQVAKK | 3.1 * 10−7 | ++ |
| S106 | 1798 | F1 | - | 1 | FHENFYDWFVRQASKK | 4.2 * 10−7 | ++ |
| S107 | 1799 | F1 | - | 1 | FHENFYDWFVRAVSKK | 10.0 * 10−7 | + |
| S108 | 1800 | F1 | - | 1 | FHENFYDWFVAQVSKK | 7.5 * 10−7 | + |
| S109 | 1801 | F1 | - | 1 | FHENFYDWFARQVSKK | 2.3 * 10−7 | ++ |
| S110 | 1802 | F1 | - | 1 | FHEAFYDWFVRQVSKK | 2.2 * 10−7 | ++ |
| S111 | 1803 | F1 | - | 1 | FHANFYDWFVRQVSKK | 3.3 * 10−7 | 0 |
| S112 | 1804 | F1 | - | 1 | FAENFYDWFVRQVSKK | 6.1 * 10−7 | + |
| S113 | 1805 | F1 | - | 1 | AHENFYDWFVRQVSKK | 5.9 * 10−7 | + |
| S114 | 1556 | F1 | - | | fhenfydwfvrqvskk | 8.3 * 10−6 | 0 |
| S115 | 1806 | F1 | - | 1 | EFHENFYDWFVRQVSEE | 6.5 * 10−7 | + |
| S116 | 1807 | F1 | - | 1 | FHENFYGWFVRQVSKK | 1.4 * 10−6 | ++ |
| S117 | 1808 | F2 | - | 1 | HETFYSMIRSLAK | 2.7 * 10−6 | 0 |
| S118 | 1809 | F2 | - | 1 | SDGFYNAIELLS | 2.4 * 10−6 | + |
| S119 | 1810 | F2 | - | 1 | SLNFYDALQLLAKK | 1.8 * 10−6 | 0 |
| S120 | 1811 | F2 | - | 1 | HDPFYSMMKSLLK | 2.0 * 10−6 | 0 |
| S121 | 1812 | F2 | - | 1 | NSFYEALRMLSSK | 3.1 * 10−6 | 0 |
| S122 | 1813 | F7 | - | | HPTSKEIYAKLLK | 9.3 * 10−6 | 0 |
| S123 | 1814 | F7 | - | | HPSTNQMLMKLFK | 1.6 * 10−5 | 0 |
| S124 | 1815 | F7 | - | | HPPLSELKLFLIKK | 2.3 * 10−5 | 0 |
| S127 | 1816 | F2 | - | 1 | WSDFYSYFQGLD | 1.2 * 10−6 | 0 |
| S128 | 1817 | F1-F1 | C-C | 1-1 | (FHENFYDWFVRQVSKK)₂-Dap | 1.1 * 10−6 | ++ |
| | and | | | | | | |
| | 1818 | | | | | | |
| S129 | 1819 | F2 | - | 1 | SSNFYQALMLLS | 2.9 * 10−6 | 0 |
| S131 | 1820 | F1 | - | 1 | FHENFYDWFVRQVSKK-Lig | 1.2 * 10−6 | + |
| S137 | 1821 | F1 | - | 1 | HENFYGWFVRQVSKK | 7.7 * 10−7 | 0 |
| S145 | 1822 | F1-F1 | C-C | 1-1 | (FHENFYDWFVRQVSKK)₂-Lys | 1.5 * 10−6 | ++ |
| | and | | | | | | |
| | 1823 | | | | | | |
| S158 | 1780 | F1 | - | 1 | FHENFYDWFVRQVSK | 8.1 * 10−7 | + |
| S165 | 1554 | F1 | - | 1 | FYDWF | >2 * 10−5 | 0 |
| S166 | 1824 | F1 | - | 1 | FYDWFKK | >2 * 10−5 | 0 |
| S167 | 1825 | F1 | - | 1 | AFYDWFAKK | >2 * 10−5 | − |
| S168 | 1826 | F1 | - | 1 | AAAAFYDWFAAAAAKK | 3.8 * 10−6 | 0 |
| S169 | 1827 | F1-F1 | N-N | 1-1 | 12-(Lig-FHENFYDWFVRQVSKK)₂ | 5.8 * 10−7 | ++ |
| | and | | | | | | |
| | 1828 | | | | | | |
| S170 | 1829 | F1-F1 | N-N | 1-1 | (CGFHENFYDWFVRQVSKK)₂ | 7.0 * 10−7 | +++ |
| | and | | | | (linked at cysteines) | | |
| | 1830 | | | | | | |
| S171 | 1831 | F1 | - | 1 | CGFHENFYDWFVRQVSKK | 2.9 * 10−6 | +++ |
| S172 | 1832 | F1-F1 | N-N | 1-1 | 14-(Lig-FHENFYDWFVRQVSKK)₂ | 4.8 * 10−6 | +++ |
| | and | | | | | | |
| | 1833 | | | | | | |
| S173 | 1834 | F3 | - | 1 | LDALDRLMRYFEERPSL | 1.2 * 10−6 | 0 |
| S174 | 1835 | F3 | - | 1 | PLAELWAYFEHSEQGRSSAH | 1.6 * 10−5 | 0 |
| S175 | 1560 | F1 | - | 1 | GRVDWLQRNANFYDWFVAELG | 2.3 * 10−7 | +++ |
| S176 | 1836 | F1 | - | 1 | NGVERAGTGDNFYDWFVAQLH | 4.7 * 10−7 | + |
| S177 | 1837 | F2 | - | 1 | EHWNTVDPFYFTLFEWLRESG | 2.7 * 10−6 | 0 |
| S178 | 1838 | F2 | - | 1 | EHWNTVDPFYQYFSELLRESG | 1.3 * 10−7 | ++ |
| S179 | 1839 | F1 | - | 1 | QSDSGTVHDRFYGWFRDTWAS | 5.4 * 10−7 | + |
| S180 | 1840 | F1 | - | 1 | AFYDWFAK | >2 * 10−5 | 0 |
| S181 | 1841 | F1 | - | 1 | AFYDWFA | >2 * 10−5 | 0 |
| S182 | 1842 | F1 | - | 1 | AFYDWF | >2 * 10−5 | 0 |
| S183 | 1843 | F1 | - | 1 | FYDWFA | >2 * 10−5 | 0 |
| S184 | 1844 | F1 | - | 1 | Ac-FYDWF | >2 * 10−5 | 0 |
| S214 | 1845 | F1 | - | 1 | AFYEWFAKK | >2 * 10−5 | 0 |
| S215 | 1846 | F1 | - | 1 | AFYGWFAKK | >2 * 10−5 | 0 |
| S216 | 1847 | F1 | - | 1 | AFYKWFAKK | >2 * 10−5 | 0 |
| S217 | 1848 | F2-F2 | C-C | 1-1 | (SDGFYNAIELLS-Lig)₂-14 | 3.9 * 10−8 | ++ |
| | and | | | | | | |
| | 1849 | | | | | | |
| S218 | 1850 | F1-F1 | C-C | 1-1 | (AFYDWFAKK-Lig)₂-14 | 1.1 * 10−5 | 0 |
| | and | | | | | | |
| | 1851 | | | | | | |
| S219 | 1852 | F1 | - | 1 | FHENAYDWFVRQVSKK | >2 * 10−5 | 0 |
| S220 | 1853 | F1 | - | 1 | FHENFADWFVRQVSKK | >2 * 10−5 | 0 |
| S221 | 1854 | F1 | - | 1 | FHENFYAWFVRQVSKK | 1.1 * 10−6 | + |
| S222 | 1855 | F1 | - | 1 | FHENFYDAFVRQVSKK | >2 * 10−5 | 0 |
| S223 | 1856 | F1 | - | 1 | FHENFYDWAVRQVSKK | >2 * 10−5 | 0 |
| S226 | 1857 | F6 | - | 2 | QLEEEWAGVQCEVYGRECPS | 1.6 * 10−6 | |
| S227 | 1858 | F1 | - | 1 | CGGFHENFYDWFVRQVSKK | 5.1 * 10−7 | ++ |
| S228 | 1859 | F1-F1 | N-N | 1-1 | (CGGFHENFYDWFVRQVSKK)₂ | 3.6 * 10−7 | ++ |
| | and | | | | (linked at cysteines) | | |
| | 1860 | | | | | | |
| S229 | 1861 | F2-F4 | C-C | 1-2 | SDGFYNAIELLS-Lig | 4.4 * 10−9 | 0 |
| | and | | | | 12 | | |
| | 1862 | | | | KHLCVLEELFWGASLFGYCSGKK-Lig | | |
| S231 | 1863 | F1-F1 | C-C | 1-1 | (FHENFYDWFVRQVSKKGGG-Lig)₂-14 | 2.7 * 10−7 | + |
| | and | | | | | | |
| | 1864 | | | | | | |
| S232 | 1865 | F1-F1 | N-N | 1-1 | 14-(Lig-GGGFHENFYDWFVRQVSKK)₂ | 3.8 * 10−7 | +++ |
| | and | | | | | | |
| | 1866 | | | | | | |
| S233 | 1867 | F1-F2 | C-C | 1-1 | FHENFYDWFVRQVSKK-Lig | 2.6 * 10−7 | + |
| | and | | | | 14 | | |
| | 1868 | | | | SDGFYNAIELLS-Lig | | |
| S234 | 1869 | F1 | - | 1 | RVDWLQRNANFYDWFVAELG | 1.3 * 10−7 | ++ |
| S235 | 1870 | F1 | - | 1 | VDWLQRNANFYDWFVAELG | 5.3 * 10−8 | ++ |
| S236 | 1871 | F1 | - | 1 | DWLQRNANFYDWFVAELG | 1.0 * 10−7 | ++ |
| S237 | 1872 | F1 | - | 1 | WLQRNANFYDWFVAELG | 8.5 * 10−7 | 0 |
| S238 | 1873 | F1 | - | 1 | LQRNANFYDWFVAELG | 8.5 * 10−7 | 0 |
| S239 | 1874 | F1 | - | 1 | QRNANFYDWFVAELG | 1.3 * 10−6 | 0 |
| S240 | 1875 | F1 | - | 1 | RNANFYDWFVAELG | 1.4 * 10−6 | |
| S241 | 1876 | F1 | - | 1 | NANFYDWFVAELG | 1.6 * 10−6 | |
| S242 | 1877 | F1 | - | 1 | ANFYDWFVAELG | 2.0 * 10−6 | |
| S243 | 1878 | F1 | - | 1 | NFYDWFVAELG | 2.0 * 10−6 | |
| S244 | 1879 | F1 | - | 1 | GRVDWLQRNANFYDWFVAELG-Lig | 2.2 * 10−7 | ++ |
| S245 | 1880 | F1 | - | 1 | Lig-GRVDWLQRNANFYDWFVAELG | 2.2 * 10−7 | + |
| S246 | 1881 | F8-F1 | C-C | 3-1 | ACAWPTYWNCGGGG-Lig | 5.0 * 10−6 | |
| | and | | | | 14 | | |
| | 1882 | | | | FHENFYDWFVRQVSKK-Lig | | |
| S248 | 1883 | F1 | - | 1 | GRVDWLQRNANFYDWFVAEL | 6.3 * 10−8 | ++ |
| S249 | 1884 | F1 | - | 1 | GRVDWLQRNANFYDWFVAE | 7.4 * 10−7 | 0 |
| S250 | 1885 | F1 | - | 1 | GRVDWLQRNANFYDWFVA | 8.9 * 10−6 | 0 |
| S251 | 1886 | F1 | - | 1 | GRVDWLQRNANFYDWFV | 5.6 * 10−6 | |
| S252 | 1887 | F2-F2 | C-C | 1-1 | (SDGFYNAIELLS-Lig)₂-14 | 4.4 * 10−7 | 0 |
| | and | | | | | | |
| | 1888 | | | | | | |
| S253 | 1889 | F1-F1 | C-C | 1-1 | (GRVDWLQRNANFYDWFVAELG-Lig)₂-14 | 2.2 * 10−8 | ++ |
| | and | | | | | | |
| | 1890 | | | | | | |
| S255 | 1891 | F2-F2 | C-C | 1-1 | (SDGFYNAIELLSGGG-Lig)₂-14 | 1.6 * 10−6 | 0 |
| | and | | | | | | |
| | 1892 | | | | | | |
| S256 | 1893 | F6 | - | 2 | Acy-CLEEwGASL-Tic-QCSG | 9.0 * 10−6 | − |
| S257 | 1894 | F2 | - | 1 | RWPNFYGYFESLLTHFS | 1.4 * 10−5 | 0 |
| S259 | 1895 | F2 | - | 1 | EGWDFYSYFSGLLASVT | 7.7 * 10−6 | 0 |
| S260 | 1896 | F2 | - | 1 | LDRQFYRYFQDLLVGFM | 2.3 * 10−6 | 0 |
| S261 | 1897 | F2 | - | 1 | WGRSFYRYFETLLAQGI | >2 * 10−5 | 0 |
| S262 | 1898 | F4 | - | 1 | PLCFLQELFGGASLGGYCSG | 1.9 * 10−5 | 0 |
| S263 | 1899 | F6 | - | 2 | WLEQERAWIWCEIQGSGCRA | >2 * 10−5 | 0 |
| S264 | 1900 | F1 | - | 1 | IQGWEPFYGWFDDWAQMFEE | 1.9 * 10−7 | 0 |
| S265 | 1901 | F1 | - | 1 | TGHRLGLDEQFYWWFRDALSG | 1.1 * 10−7 | 0 |
| S266 | 1902 | F6 | - | 2 | Abu-CLEEwGASL-Tic-QCSG | >2 * 10−5 | 0 |
| S268 | 1903 | F1 | - | 1 | RD-Hyp-FYDWFDDi | 4.5 * 10−7 | 0 |
| S273 | 1904 | F1-F2 | C-N | 1-1 | FHENFYDWFVRQVSKK-Lig-14-Lig-SDGFYNAIELLS | 1.5 * 10−6 | + |
| S278 | 1905 | F1-derived | - | 1 | GFREGQRWYWFVAQVT | >2 * 10−5 | 0 |
| S281 | 1906 | ES | - | | DLRVLCELFGGAYVLGYCSE | 1.1 * 10−5 | 0 |
| S282 | 1907 | F4-derived | - | | HLSVGEELSWWVALLGQWAR | >2 * 10−5 | 0 |
| S283 | 1908 | F4-derived | - | | APVSTEELRWGALLFGQWAG | >2 * 10−5 | 0 |
| S284 | 1909 | F6-derived | - | | ALEEEWAWVQVRSIRSGLPL | >2 * 10−5 | 0 |
| S285 | 1910 | F6-derived | - | | WLEHEWAQIQCELYGRGCTY | 8.3 * 10−7 | |
| S287 | 1911 | F1 | - | 1 | QAPSNFYDWFVREWDEE | 5.9 * 10−6 | 0 |
| S288 | 1912 | F2 | - | 1 | QSFYDYIEELLGGEWKK | 4.3 * 10−6 | 0 |
| S289 | 1913 | F2 | - | 1 | DPFYQGLWEWLRESGEE | >2 * 10−5 | 0 |
| S290 | 1914 | F1-F1 | N-N | 1-1 | 7-( Lig-GGGFHENFYDWFVRQVSKK)₂ | 9.0 * 10−7 | ++ |
| | and | | | | | | |
| | 1915 | | | | | | |
| S291 | 1916 | F1-F1 | N-N | 1-1 | 9-(Lig-GGGFHENFYDWFVRQVSKK)₂ | 1.2 * 10−6 | |
| | and | | | | | | |
| | 1917 | | | | | | |
| S292 | 1918 | F1-F1 | N-N | 1-1 | 12-(Lig-GGGFHENFYDWFVRQVSKK)₂ | 7.5 * 10−7 | ++ |
| | and | | | | | | |
| | 1919 | | | | | | |
| S293 | 1920 | F1-F1 | N-N | 1-1 | 13-(Lig-GGGFHENFYDWFVRQVSKK)₂ | 1.2 * 10−7 | ++ |
| | and | | | | | | |
| | 1921 | | | | | | |
| S294 | 1922 | F1 | - | 1 | DWLQRNANFYDWFVAEL-Lig | 1.3 * 10−7 | ++ |
| S295 | 1923 | F1 | - | 1 | Lig-DWLQRNANFYDWFVAEL | 4.8 * 10−7 | + |
| S300 | 1924 | F1-F1 | C-C | 1-1 | (DWLQRNANFYDWFVAEL-Lig′)₂-14 | 5.0 * 10−8 | +++ |
| | and | | | | | | |
| | 1925 | | | | | | |
| S301 | 1926 | F1-F1 | N-N | 1-1 | 14-(Lig′-DWLQRNANFYDWFVAEL)₂ | 6.4 * 10−7 | + |
| | and | | | | | | |
| | 1927 | | | | | | |
| S302 | 1928 | F2 | - | 1 | SDGFYNA-Acy-ELLSG | 8.6 * 10−7 | 0 |
| S303 | 1929 | F2 | - | 1 | SGPFYEE-Acy-ELLW-Aib-G | 5.7 * 10−6 | 0 |
| S304 | 1930 | F2 | - | 1 | GGSFYDD-Acy-E-Aib-LW-Aib-G | 2.1 * 10−5 | 0 |
| S305 | 1931 | F2 | - | 1 | N-Aib-PFYDE-Acy-DE-Cha-W-Aib-G | 8.4 * 10−7 | 0 |
| S306 | 1932 | F1 | - | 1 | GRVDWLQRNANFYDWFVAE-Acy-G | 2.2 * 10−6 | +++ |
| S312 | 1933 | F1-F1 | N-N | 1-1 | 23-(Lig′-GGGFHENFYDWFVRQVSKK)₂ | 2.9 * 10−6 | ++ |
| | and | | | | | | |
| | 1934 | | | | | | |
| S313 | 1935 | F2-F2 | C-C | 1-1 | (SDGFYNAIELLS-Lig′)₂-23 | 2.4 * 10−7 | |
| | and | | | | | | |
| | 1936 | | | | | | |
| S315 | 1937 | F1 | - | 1 | WFYDWFWE | 6.8 * 10−6 | 0 |
| S316 | 1938 | F10 | - | 1 | WQGYAWLS | 7.0 * 10−6 | 0 |
| S317 | 1939 | F10 | - | 1 | WPGYAWLS | >2 * 10−5 | 0 |
| S319 | 1940 | F1 | - | 1 | D-Aic-D-Aib-EFYDWFDEiPq | 8.7 * 10−7 | 0 |
| S320 | 1941 | F1 | - | 1 | KNNKEFYEWFDEiGq | 2.8 * 10−6 | 0 |
| S321 | 1942 | F1 | - | 1 | YeRD-Hyp-FYDWFDEiGq | 1.4 * 10−6 | 0 |
| S322 | 1943 | F1 | - | 1 | EWRD-Hyp-FYDWFDEi-Hyp-e | 7.2 * 10−7 | 0 |
| S325 | 1944 | F1-F1 | N-N | 1-1 | 9-(Lig′-GSLDESFYDWFERQLGKK)₂ | 4.6 * 10−8 | +++++ |
| | and | | | | | | |
| | 1945 | | | | | | |
| S326 | 1600 | F1 | - | 1 | GIISQSCPESFYDWFAGQVSDPWWCW | 5.9 * 10−7 | − |
| S327 | 1946 | F2 | - | 1 | TFYSCLASLLTGTPQPNRGPWERCRKK | 2.7 * 10−6 | − |
| S329 | 1947 | F1-F1 | N-N | 1-1 | 17-(Lig′-FHENFYDWFVRQVSKK)₂ | 2.7 * 10−6 | ++ |
| | and | | | | | | |
| | 1948 | | | | | | |
| S331 | 1949 | F4 | - | 2 | KHLCVLEELFWGASLFGYCSGKK | 1.6 * 10−6 | 0 |
| S332 | 1950 | F1-F1 | C-C | 1-1 | (GSLDESFYDWFERQLGKK-Lig′)₂-9 | 2.1 * 10−8 | +++++ |
| | and | | | | | | |
| | 1951 | | | | | | |
| S333 | 1952 | F1-F1 | N-N | 1-1 | 22-(Lig′-GSLDESFYDWFERQLGKK)₂ | 1.4 * 10−7 | ++++ |
| | and | | | | | | |
| | 1953 | | | | | | |
| S334 | 1954 | F1-F1 | N-N | 1-1 | 22-(Lig′-GGGFHENFYDWFVRQVSKK)₂ | 1.6 * 10−6 | +++ |
| | and | | | | | | |
| | 1955 | | | | | | |
| S335 | 1956 | F1-F1 | C-C | 1-1 | (GSLDESFYDWFERQLGKK-Lig′)₂-22 | 9.8 * 10−8 | ++++ |
| | and | | | | | | |
| | 1957 | | | | | | |
| S336 | 1958 | F1-F1 | N-N | 1-1 | 23-(Lig′-GSLDESFYDWFERQLGKK)₂ | 1.5 * 10−8 | +++ |
| | and | | | | | | |
| | 1959 | | | | | | |
| S337 | 1960 | F1-F1 | C-C | 1-1 | (GSLDESFYDWFERQLGKK-Lig′)₂-23 | 1.1 * 10−8 | +++++ |
| | and | | | | | | |
| | 1961 | | | | | | |
| S342 | 1962 | F1 | - | 1 | DLWFNAKEDMNFYDWFVWQLR | 1.8 * 10−6 | 0 |
| S344 | 1963 | F2 | - | 1 | EHWNTVDPFYHWISELLRESGA | 2.0 * 10−7 | 0 |
| S345 | 1964 | F2 | - | 1 | EHWNTVDPFYQYFAELLRESGA | 2.9 * 10−6 | 0 |
| S349 | 1965 | F1-F1 | N-N | 1-1 | 23-(Lig′-GGGFHENFYDWFVRQVSKK)₂ | 1.3 * 10−7 | ++++ |
| | and | | | | | | |
| | 1966 | | | | | | |
| S350 | 1967 | F1-F1 | C-C | 1-1 | (GSLDESFYDWFERQLGKK-Lig′)₂-21 | 4.7 * 10−7 | ++++ |
| | and | | | | | | |
| | 1968 | | | | | | |
| S351 | 1969 | F1-F1 | N-N | 1-1 | 21-(Lig′-GSLDESFYDWFERQLGKK)₂ | 1.4 * 10−6 | +++ |
| | and | | | | | | |
| | 1970 | | | | | | |
| S352 | 1971 | F1-F1 | N-N | 1-1 | 21-(Lig′-GGGFHENFYDWFVRQVSKK)₂ | 6.6 * 10−7 | +++ |
| | and | | | | | | |
| | 1972 | | | | | | |
| S353 | 1973 | F1-F1 | C-C | 1-1 | (GSLDESFYDWFERQLGKK-Lig′)₂-14 | 1.1 * 10−8 | ++++++ |
| | and | | | | | | |
| | 1974 | | | | | | |
| S354 | 1975 | F1-F1 | N-N | 1-1 | 14-(Lig′-GSLDESFYDWFERQLGKK)₂ | 3.9 * 10−8 | ++++ |
| | and | | | | | | |
| | 1976 | | | | | | |
| S359 | 1977 | F1-F1 | N-N | 1-1 | 9-(Lig′-DWLQRNANFYDWFVAEL)₂ | 7.0 * 10−7 | + |
| | and | | | | | | |
| | 1978 | | | | | | |
| S360 | 1979 | F1-F1 | N-N | 1-1 | 23-(Lig′-DWLQRNANFYDWFVAEL)₂ | 9.9 * 10−7 | |
| | and | | | | | | |
| | 1980 | | | | | | |
| S361 | 1981 | F1-F1 | C-C | 1-1 | (GSLDESFYDWFERQLGKK-Lig′)₂-24 | 2.2 * 10−6 | +++ |
| | and | | | | | | |
| | 1982 | | | | | | |
| S362 | 1983 | F1-F1 | N-N | 1-1 | 24-(Lig′-GSLDESFYDWFERQLGKK)₂ | 1.1 * 10−7 | ++++ |
| | and | | | | | | |
| | 1984 | | | | | | |
| S363 | 1985 | F1-F1 | N-N | 1-1 | 24-(Lig′-GGGFHENFYDWFVRQVSKK)₂ | 2.2 * 10−7 | +++ |
| | and | | | | | | |
| | 1986 | | | | | | |
| S365 | 1987 | F1 | - | 1 | RMYFSTGAPQNFYDWFVQEWD | 1.0 * 10−5 | 0 |
| S366 | 1988 | F1 | - | 1 | PLRESRNFYDWFVQQLE | 3.7 * 10−7 | 0 |
| S368 | 1989 | F2 | - | 1 | RGTRSDPFYHKLSELLQGH | >2 * 10−5 | 0 |
| S371 | 1558 | F1 | - | 1 | GSLDESFYDWFERQLGKK | 6.3 * 10−7 | + |
| S372 | 1990 | F1 | - | 1 | SGSLDESFYDWFERQLGKK | 2.0 * 10−7 | ++ |
| S373 | 1991 | F1 | - | 1 | GSLDESFYDWFERQLGKKK(S) | 1.2 * 10−7 | +++ |
| S374 | 1992 | F1-F1 | N-N | 1-1 | 17-(Ald-GSLDESFYDWFERQLGKK)₂ | 1.8 * 10−7 | ++++ |
| | and | | | | | | |
| | 1993 | | | | | | |
| S375 | 1994 | F1-F1 | C-N | 1-1 | (GSLDESFYDWFERQLGKKK-Ald)-14- | 2.0 * 10−7 | ++++ |
| | | | | | (Ald-GSLDESFYDWFERQLGKK) | | |
| S376 | 1995 | F1-F1 | N-N | 1-1 | 19-(Ald-GSLDESFYDWFERQLGKK)₂ | 1.6 * 10−7 | ++++ |
| | and | | | | | | |
| | 1996 | | | | | | |
| S378 | 1997 | F1-F1 | C-C | 1-1 | (GSLDESFYDWFERQLGKKK-Ald)₂-17 | 6.5 * 10−8 | +++++ |
| | and | | | | | | |
| | 1998 | | | | | | |
| S379 | 1999 | F1-F1 | C-C | 1-1 | (GSLDESFYDWFERQLGKKK-Ald)₂-19 | 5.6 * 10−8 | +++++ |
| | and | | | | | | |
| | 2000 | | | | | | |
| S380 | 2001 | F1-F1 | C-C | 1-1 | (EEDWLQRNANFYDWFVAEL-Lig′)₂-9 | 5.1 * 10−7 | ++ |
| | and | | | | | | |
| | 2002 | | | | | | |
| S381 | 2003 | F1-F1 | C-C | 1-1 | (EEDWLQRNANFYDWFVAEL-Lig′)₂-23 | 1.2 * 10−7 | ++++ |
| | and | | | | | | |
| | 2004 | | | | | | |
| S386 | 1559 | F1 | - | 1 | GSLDESFYDWFERQLG | 3.2 * 10−7 | + |
| S387 | 2005 | F1 | - | 1 | SLDESFYDWFERQLG | 6.3 * 10−7 | + |
| S388 | 2006 | F1 | - | 1 | LDESFYDWFERQLG | 3.4 * 10−7 | + |
| S389 | 2007 | F1 | - | 1 | DESFYDWFERQLG | 1.1 * 10−6 | + |
| S390 | 1794 | F1 | - | 1 | ESFYDWFERQLG | 6.2 * 10−7 | + |
| S391 | 2008 | F1 | - | 1 | SFYDWFERQLG | 1.5 * 10−6 | + |
| S392 | 2009 | F1 | - | 1 | FYDWFERQLG | 3.8 * 10−6 | 0 |
| S394 | 1788 | F1 | - | 1 | GSLDESFYDWFERQ | 9.1 * 10−8 | + |
| S395 | 1787 | F1 | - | 1 | GSLDESFYDWFERQL | 8.1 * 10−8 | ++ |
| S396 | 1789 | F1 | - | 1 | GSLDESFYDWFER | >2 * 10−5 | 0 |
| S397 | 2010 | F1 | - | 1 | GSLDESFYDWFE | >2 * 10−5 | 0 |
| S398 | 2011 | F1 | - | 1 | GSLDESFYDWF | >2 * 10−5 | 0 |
| S399 | 1790 | F1 | - | 1 | ESFYDWFERQL | 9.5 * 10−8 | ++ |
| S400 | 1791 | F1 | - | 1 | ESFYDWFERQ | 6.3 * 10−7 | 0 |
| S401 | 2012 | F1 | - | 1 | ESFYDWFER | >2 * 10−5 | 0 |
| S402 | 2013 | F1 | - | 1 | ESFYDWFE | >2 * 10−5 | 0 |
| S403 | 2014 | F1 | - | 1 | ESFYDWF | >2 * 10−5 | 0 |
| S414 | 2015 | F1-F1 | C-C | 1-1 | (ESFYDWFERQLGK-Lig′)₂-14 | 3.8 * 10−7 | ++++ |
| | and | | | | | | |
| | 2016 | | | | | | |
| S415 | 2017 | F1-F1 | C-C | 1-1 | (ESFYDWFERQLGK-Lig′)₂-23 | 1.0 * 10−7 | ++++ |
| | and | | | | | | |
| | 2018 | | | | | | |
| S416 | 2019 | F1-F1 | N-N | 1-1 | 14-(Lig′-ESFYDWFERQLG)₂ | 9.3 * 10−7 | +++ |
| | and | | | | | | |
| | 2020 | | | | | | |
| S417 | 2021 | F1-F1 | N-N | 1-1 | 23-(Lig′-ESFYDWFERQLG)₂ | 9.2 * 10−7 | +++ |
| | and | | | | | | |
| | 2022 | | | | | | |
| S418 | 2023 | F1-F1 | C-C | 1-1 | (ESFYDWFERQLGK-Ald)₂-17 | 1.2 * 10−7 | ++++ |
| | and | | | | | | |
| | 2024 | | | | | | |
| S419 | 2025 | F6-F6 | N-N | 2-2 | 14-(Lig′-EWLDQEWAWVQCEVYGRGCPSEE)₂ | | 0 |
| | and | | | | | | |
| | 2026 | | | | | | |
| S420 | 2027 | F1-F1 | N-N | 1-1 | 17-(Ald-ESFYDWFERQLG)₂ | | ++ |
| | and | | | | | | |
| | 2028 | | | | | | |
| S423 | 2029 | F1-F8 | C-C | 1-3 | ESFYDWFERQLG | 6.2 * 10−8 | 0 |
| | and | | | | K | | |
| | 2030 | | | | ACAWPTYWNCG | | |
| S425 | 2031 | F1-F6 | C-N | 1-2 | GSLDESFYDWFERQLGKK-Lig′-14-Lig′- | 2.4 * 10−9 | − |
| | | | | | EWLDQEWAWVQCEVYGRSCPSEE | | |
| S429 | 2032 | F6-F1 | C-N | 2-1 | EWLDQEWAWVQCEVYGRGCPSEE-Lig′-14-Lig′- | 6.0 * 10−10 | |
| | | | | | GSLDESFYDWFERQLGKK | | |
| S432 | 2033 | F1-F6 | C-C | 1-2 | ESFYDWFERQLGGGG | 1.8 * 10−7 | + |
| | and | | | | K | | |
| | 2034 | | | | CEVYGRGCPS | | |
| S433 | 2035 | F1-F6 | C-C | 1-2 | ESFYDWFERQLGGGG | 1.1 * 10−7 | + |
| | and | | | | K | | |
| | 2036 | | | | WLDQEWAWVQ | | |
| S436 | 2037 | F1-F6 | C-C | 1-2 | ESFYDWFERQLGGGG | 5.2 * 10−10 | +++ |
| | and | | | | K | | |
| | 2038 | | | | WLDQEWAWVQCEVYGRGCPS | | |
| S437 | 2039 | F1-F6 | C-C | 1-2 | ESFYDWFERQLGGGG | 6.9 * 10−10 | +++ |
| | and | | | | K | | |
| | 2040 | | | | LDQEWAWVQCEVYGRGCPS | | |
| S438 | 2041 | F1-F6 | C-C | 1-2 | ESFYDWFERQLGGGG | 3.0 * 10−8 | ++ |
| | and | | | | K | | |
| | 2042 | | | | DQEWAWVQCEVYGRGCPS | | |
| S439 | 2043 | F1-F6 | C-C | 1-2 | ESFYDWFERQLGGGG | 4.6 * 10−8 | |
| | and | | | | K | | |
| | 2044 | | | | QEWAWVQCEVYGRGCPS | | |
| S440 | 2045 | F1-F6 | C-C | 1-2 | ESFYDWFERQLGGGG | 9.9 * 10−8 | |
| | and | | | | K | | |
| | 2046 | | | | EWAWVQCEVYGRGCPS | | |
| S441 | 2047 | F1-F6 | C-C | 1-2 | ESFYDWFERQLGGGG | 1.2 * 10−7 | |
| | and | | | | K | | |
| | 2048 | | | | WAWVQCEVYGRGCPS | | |
| S442 | 2049 | F1-F6 | C-C | 1-2 | ESFYDWFERQLGGGG | 1.6 * 10−7 | |
| | and | | | | K | | |
| | 2050 | | | | AWVQCEVYGRGCPS | | |
| S443 | 2051 | F1-F6 | C-C | 1-2 | ESFYDWFERQLGGGG | 1.7 * 10−7 | |
| | and | | | | K | | |
| | 2052 | | | | WVQCEVYGRGCPS | | |
| S444 | 2053 | F1-F6 | C-C | 1-2 | ESFYDWFERQLGGGG | 1.9 * 10−7 | |
| | and | | | | K | | |
| | 2054 | | | | VQCEVYGRGCPS | | |
| S445 | 2055 | F1-F6 | C-C | 1-2 | ESFYDWFERQLGGGG | 2.3 * 10−7 | |
| | and | | | | K | | |
| | 2056 | | | | QCEVYGRGCPS | | |
| S453 | 2057 | F1-F6 | C-N | 1-2 | GSLDESFYDWFERQLGKKK-Ald-17-Ald- | 5.7 * 10−10 | |
| | | | | | KEWLDQEWAWVQCEVYGRGCPSEE | | |
| S454 | 2058 | F1-F6 | C-C | 1-2 | GSLDESFYDWFERQLGKKK-Ald | 3.8 * 10−10 | +++ |
| | and | | | | 17 | | |
| | 2059 | | | | EWLDQEWAWVQCEVYGRGCPSEEK-Ald | | |
| S455 | 2060 | F6-F1 | C-N | 2-1 | EWLDQEWAWVQCEVYGRGCPSEEK-Ald-18-Ald- | 1.1 * 10−9 | ++++ |
| | | | | | GSLDESFYDWFERQLGKK | | |
| S456 | 2061 | F1-F6 | N-N | 1-2 | Ald-GSLDESFYDWFERQLGKK | 2.4 * 10−9 | +++ |
| | and | | | | 17 | | |
| | 2062 | | | | Ald-KEWLDQEWAWVQCEVYGRGCPSEE | | |
| S457 | 2063 | F6-F1 | C-N | 2-1 | WLDQEWAWVQCEVYGRGCPSGGSGGSGSLDESFYDWFERQLG | 1.6 * 10−9 | ++++ |
| S458 | 2064 | F6-F1 | C-N | 2-1 | WLDQEWAWVQCEVYGRGCPSGGSGGSGSLDESFYDWFERQLG | 3.2 * 10−9 | ++++ |
| S459 | 2065 | F1-F6 | C-N | 1-2 | GSLDESFYDWFERQLGGGSGGSWLDQEWAWVQCEVYGRGCPS | 7.6 * 10−11 | − |
| S467 | 2066 | F6-F1 | C-N | 2-1 | EWLDQEWAWVQCEVYGRGCPSEEK-Ald-16-Ald- | 6.8 * 10−10 | ++++ |
| | | | | | GSLDESFYDWFERQLGKK | | |
| S468 | 2067 | F6-F1 | C-N | 2-1 | EWLDQEWAWVQCEVYGRGCPSEEK-Ald-19-Ald- | 4.0 * 10−10 | ++++ |
| | | | | | GSLDESFYDWFERQLGKK | | |
| S471 | 2068 | F6-F1 | C-N | 2-1 | LDQEWAWVQCEVYGRGCPSESFYDWFERQLG | 6.7 * 10−10 | ++++ |
| S481 | 2069 | F6-F1 | C-N | 2-1 | HHHHHHKLDQEWAWVQCEVYGRGCPSESFYDWFERQLG | 1.3 * 10−9 | |
| S482 | 2070 | F6-F1 | C-N | 2-1 | LDQEWAWVQCEVYGRGCPSESFYDWFERQLG | | |
| S483 | 2071 | F6-F1 | C-N | 2-1 | LDEWAWVQCVEYGRGCPSESFYDWFERQLG | 5.2 * 10−8 | 0 |
| S484 | 2072 | F6-F1 | C-N | 2-1 | LDQEWAVQCEVYGRGCPSESFYDWFERQLG | 8.7 * 10−8 | 0 |
| S485 | 2073 | F6-F1 | C-N | 2-1 | LDQEWAWVCEVYGRGCPSESFYDWFERQLG | 1.6 * 10−7 | 0 |
| S486 | 2074 | F6-F1 | C-N | 2-1 | LDQEWAWVQCVYGRGCPSESFYDWFERQLG | 5.7 * 10−8 | 0 |
| S487 | 2075 | F6-F1 | C-N | 2-1 | LDQEWAWVQCEVYGRCPSESFYDWFERQLG | | |
| S488 | 2076 | F6-F1 | C-N | 2-1 | LDQEWAWVQCEVYGRGCSESFYDWFERQLG | | |
| S489 | 2077 | F6-F1 | C-N | 2-1 | LDQEWAWVQCEVYGRGCPESFYDWFERQLG | | |
| S490 | 2078 | F6-F1 | C-N | 2-1 | LDQEWAWVQCEVYGRGCESFYDWFERQLG | | |
| S491 | 2079 | F6-F1 | C-N | 2-1 | LDQEWAWVQCEVYGRGCPSEFYDWFERQLG | | |
| S492 | 2080 | F6-F1 | C-N | 2-1 | LDQEWAWVQCEVYGRGCPSESFYDWFRQLG | | |
| S493 | 2081 | F6-F1 | C-N | 2-1 | EWLDQEWAWVQCEVYGRGCPSEE-POX-Lys(biotin) | | |
| S494 | 2082 | F6-F1 | C-N | 2-1 | ADQEWAWVQCEVYGRGCPSESFYDWFERQLG | 1.7 * 10−8 | + |
| S495 | 2083 | F6-F1 | C-N | 2-1 | LAQEWAWVQCEVYGRGCPSESFYDWFERQL | 2.6 * 10−9 | |
| S496 | 2084 | F6-F1 | C-N | 2-1 | LDAEWAWVQCEVYGRGCPSESFYDWFERQL | | |
| S497 | 2085 | F6-F1 | C-N | 2-1 | LDQAWAWVQCEVYGRGCPSESFYDWFERQL | 2.5 * 10−9 | +++ |
| S498 | 2086 | F6-F1 | C-N | 2-1 | LDQEAAWVQCEVYGRGCPSESFYDWFERQL | 5.6 * 10−8 | + |
| S499 | 2087 | F6-F1 | C-N | 2-1 | LDQEWAAVQCEVYGRGCPSESFYDWFERQL | 6.2 * 10−10 | ++++ |
| S500 | 2088 | F6-F1 | C-N | 2-1 | LDQEWAWAQCEVYGRGCPSESFYDWFERQL | | |
| S501 | 2089 | F6-F1 | C-N | 2-1 | LDQEWAWVACEVYGRGCPSESFYDWFERQL | | |
| S502 | 2090 | F6-F1 | C-N | 2-1 | LDQEWAWVQCAVYGRGCPSESFYDWFERQL | 3.0 * 10−9 | +++ |
| S503 | 2091 | F6-F1 | C-N | 2-1 | LDQEWAWVQCEAYGRGCPSESFYDWFERQL | 2.1 * 10−9 | |
| S504 | 2092 | F6-F1 | C-N | 2-1 | LDQEWAWVQCEVAGRGCPSESFYDWFERQL | 1.3 * 10−8 | |
| S505 | 2093 | F6-F1 | C-N | 2-1 | LDQEWAWVQCEVYARGCPSESFYDWFERQL | | |
| S506 | 2094 | F6-F1 | C-N | 2-1 | LDQEWAWVQCEVYGAGCPSESFYDWFERQL | | |
| S507 | 2095 | F6-F1 | C-N | 2-1 | LDQEWAWVQCEVYGRACPSESFYDWFERQL | | |
| S508 | 2096 | F6-F1 | C-N | 2-1 | LDQEWAWVQCEVYGRGCASESFYDWFERQL | | |
| S509 | 2097 | F6-F1 | C-N | 2-1 | LDQEWAWVQSEVYGRGSPSESFYDWFERQL | 5.7 * 10−9 | |
| S510 | 2098 | F6-F1 | C-N | 2-1 | SLEEEWAQVECEVYGRGCPSGGSGGSGLLDESFYHWFDRQLR | 6.2 * 10−11 | +++++ |
| S511 | 2099 | F6-F1 | C-N | 2-1 | WLDQEWAWVQCEVYGRGCPSGGSGGSGRVDWLQRNANFYDWF | 3.8 * 10.9 | ++ |
| | | | | | VAELG | | |
| S512 | 2100 | F6-F1 | C-N | 2-1 | WLDQEWAWVQCEVYGRGCPSGGSGGSSQAGSAFYAWFDQVLRTV | 2.8 * 10−8 | ++ |
| S513 | 2101 | F6-F1 | C-N | 2-1 | WLDQEWAWVQCEVYGRGCPSGGSGGSQSDAFYSGLWALIGLSDG | | |
| S515 | 2102 | F6 | - | 2 | LDQEWAWVQCEVYGRGCPSPOX-Lys(Biotin) | | |
| S516 | 2103 | F4-F1 | C-N | 2-1 | H-Acy-CLEEwGASL-Tic-QCSGSESFYDWFERQL | | |
| S517 | 2104 | F6-F1 | C-N | 2-1 | SIEEEWAQIKCDVWGRGCPSESFYDWFERQL | 6.0 * 10−12 | ++++++ |
| S518 | 2105 | F6-F1 | C-N | 2-1 | RLEEEWAWVQCEVYGRGCPSGSLDESFYDWFERQLG | 1.6 * 10−10 | +++++ |
| S519 | 2106 | F6-F1 | C-N | 2-1 | SLEEEWAQVECEVYGRGCPSGSLDESFYDWFERQLG | 2.0 * 10−11 | +++++++ |
| S520 | 2107 | F6-F1 | C-N | 2-1 | SIEEEWAQIKCDVWGRGCPPGLLDESFYHWFDRQLR | 2.0 * 10−11 | ++++++ |
| S521 | 2108 | F4-F1 | C-N | 2-1 | HLCVLEELFWGASLFGYCSGGSLDESFYDWFERQL | 2.7 * 10−8 | + |
| S522 | 2109 | F4-F1 | C-N | 2-1 | HLCVLEELFWGASLFGYCSGGRVDWLQRNANFYDWFVAELG | | |
| S523 | 2110 | F6-F1O | C-N | 2-1 | WLDQEWAWVQCEVYGRGCPSDSDWAGYEWFEEQLD | 4.3 * 10−9 | ++ |
| S524 | 2111 | F6-F1 | C-N | 2-1 | HHHHHHKSLEEEWAQVECEVYGRGCPSGSLDESFYDWFERQLG | 1.1 * 10−11 | ++++++ |
| S527 | 2228 | F4-F1 | C-N | 2-1 | H-Acy-CAQEwGSEL-Tic-QCSGSESFYDWFERQL | 2.4 * 10−9 | |
| | 2229 | | | | | | |
| S530 | 2230 | F6-F1 | C-N | 2-1 | SLEEEWAQVECEVYGRGCPSESFYDWFERQL | 8.0 * 10−12 | +++++++ |
| S531 | 2231 | F6-F1 | C-N | 2-1 | SLEEEWAQVECEVYGRGCPSFYDWFERQL | 7.5 * 10−11 | +++ |
| S532 | 2232 | F6-F1 | C-N | 2-1 | SLEEEWAWVECEVYGRGCPSGSLDESFYDWFERQL | 3.7 * 10−11 | +++++ |
| S533 | 2233 | F6-F1 | C-N | 2-1 | LDQEWAQVQCEVYGRGCPSESFYDWFERQL | 6.7 * 10−11 | ++++ |
| S534 | 2234 | F6-F1 | C-N | 2-1 | SLEEEWAWVQCEVYGRGCPSESFYDWFERQL | 1.0 * 10−11 | ++++++ |
| S535 | 2235 | F6-F1 | C-N | 2-1 | QLDEEWAGVQCEVYGRGCSLDESFYDWFERQLG | | |
| S536 | 2236 | F6-F1 | C-N | 2-1 | LEEEWAQVECEVYGRGCPSESFYDWFERQL | 8.3 * 10−11 | ++++ |
| S537 | 2237 | F6-F1 | C-N | 2-1 | SLEHEWAQVECEVYGRGCPSGSLDESFYDWFERQLG | 4.4 * 10−11 | ++++ |
| S538 | 2238 | F6-F1 | C-N | 2-1 | SLEQEWAQVECEVYGRGCPSGSLDESFYDWFERQLG | 3.8 * 10−11 | ++++ |
| S539 | 2239 | F6-F1 | C-N | 2-1 | SLELEWAQVECEVYGRGCPSGSLDESFYDWFERQLG | 9.8 * 10−11 | ++++ |
| S540 | 2240 | F6-F1 | C-N | 2-1 | SLEEEWAQVKCEVYGRGCPSGSLDESFYDWFERQLG | 1.3 * 10−11 | +++++ |
| S541 | 2241 | F6-F1 | C-N | 2-1 | SLEEEWAQVECEVWGRGCPSGSLDESFYDWFERQLG | 7.8 * 10−12 | +++++++ |
| S542 | 2242 | F6-F1 | C-N | 2-1 | SLEEEWAQVECEVYGRGCPSGSLDESFYHWFERQLG | 2.7 * 10−11 | ++++++ |
| S543 | 2243 | F1-F6 | C-N | 1-2 | GSLDESFYDWFERQLGGGSGGSWLDEEWAQVQCEVYGRGCPS | 1.9 * 10−11 | −−− |
| S544 | 2244 | F1-F6 | C-N | 1-2 | ESFYDWFERQLGWLDQEWAWVQCEVYGRGCPS | | |
| S545 | 2245 | F1-F6 | C-N | 1-2 | ESFYDWFERQLGWLDEEWAQVQCEVYGRGCPS | | |
| S546 | 2246 | F6-F1 | C-N | 2-1 | SLEEEWAQVECEV-Bpa-GRGCPSGSLDESFYDWFERQ−Bpa−GK | 2.6 * 10−8 | |
| | 2247 | | | | (Biotin) | | |
| S547 | 2248 | F6 | | 2 | SLEEEWAQVECEVYGRGCPS | 4.9 * 10−8 | − |
| S548 | 2249 | F6 | | 2 | SLEEEWAQVECEVWGRGCPS | 4.1 * 10−9 | − |
| S549 | 2250 | F6-F1 | C-N | 2-1 | SLEEEWAQVECEVYGRGCSGSLDESFYDWFERQLG | 1.3 * 10−11 | ++++++ |
| S550 | 2251 | F1 | | 1 | Ac-GSLDESFYDWFERQLG-POX-K | 4.0 * 10−8 | |
| S551 | 2252 | F6-F1 | C-N | 2-1 | SLEEEWAQVEAEVYGRGAPSGSLDESFYDWFERQLG | 7.2 * 10−11 | |
| S552 | 2253 | F6-F1 | C-N | 2-1 | SLEEEWAQVECEVYGRGCPSGSLDESFYDWFERQLGKHHHHHH | | |
| S553 | 2254 | F6-F1 | C-N | 2-1 | SLEEEWAQVECEVYGRGCPPGLLDESFYHWFDRQLR | 7.3 * 10−12 | |
| S554 | 2255 | F6-F1 | C-N | 2-1 | SLEEEWAQIECEVYGRGCPSESFYDWFERQLG | 6.4 * 10−12 | +++++++ |
| S555 | 2256 | F6-F1 | C-N | 2-1 | SLEEEWAQVECEVYGRGCPSESFYDWFVRQLG | 5.7 * 10−11 | ++++ |
| S556 | 2257 | F6-F1 | C-N | 2-1 | SIEEEWAQIKCDVWGRGCSESFYDWFERQL | 3.2 * 10−11 | ++++ |
| S557 | 2258 | F6-F1 | C-N | 2-1 | SLEEEWAQIECEVYGRGCPSESFYDWFERQL | 2.0 * 10−11 | |
| S558 | 2259 | F6-F1 | C-N | 2-1 | SLEEEWAQIECEVWGRGCPSESFYDWFERQL | 1.9 * 10−11 | +++++++ |
| S559 | 2260 | F6-F1 | C-N | 2-1 | SLEEEWAQIECEVWGRGCSESFYDWFERQL | 2.1 * 10−11 | +++++++ |
| S560 | 2261 | F6-F1 | C-N | 2-1 | SLEEEWAQIECEVWGRGCPSGSLDESFYDWFERQL | 1.4 * 10−11 | +++++++ |
| S561 | 2262 | F6-F1 | C-N | 2-1 | SLEEEWAQIECEVWGRGCSGSLDESFYDWFERQL | 1.8 * 10−11 | +++++++ |
| S562 | 2263 | F6-F1 | C-N | 2-1 | SIEEEWAQIKCDVWGRCSESFYDWFERQL | 1.8 * 10−11 | ++++ |
| S563 | 2264 | F6-F1 | C-N | 2-1 | SLEEEWAQIQCEVWG RncSESFYDWFERQL | 1.4 * 10−11 | +++++ |
| | 2265 | | | | | | |
| S564 | 2266 | F6-F1 | C-N | 2-1 | SLEEEWAQIQCEVWGRCSESFYDWFERQL | 1.3 * 10−11 | ++++++ |
| S565 | 2267 | F6-F1 | C-N | 2-1 | SIEEEWAQIQCEVWG RpcSESFYDWFERQL | | |
| | 2268 | | | | | | |
| S566 | 2269 | F6-F1 | C-N | 2-1 | SIEEEWAQVECEVWGRGCPSESFYDWFERQLG | | |
| S567 | 2270 | F6-F1 | C-N | 2-1 | SI EEEWAQIECDVWGRGPSESFYDWFERQLG | | |
| S568 | 2271 | F6-F1 | C-N | 2-1 | AcSIEEEWAQIKCDVWGRGPSESFYDWFERQLG | 4.3 * 10−12 | +++++++ |
| S569 | 2272 | F6-F1 | C-N | 2-1 | SLEEEWAQIEEVWGRGPSESFYDWFERQLG | 1.5 * 10−10 | +++ |
| S570 | 2273 | F6-F1 | C-N | 2-1 | SLEEEWAQIEEVWGRPSESFYDWFERQLG | 7.3 * 10−10 | +++ |
| S571 | 2274 | F6-F1 | C-N | 2-1 | SLEEEWAQIEEVWGRGSESFYDWFERQLG | 1.6 * 10−9 | |
| S572 | 2275 | F6-F1 | C-N | 2-1 | SLEEEWAQIEEVWGRSESFYDWFERQLG | 4.8 * 10−9 | |
| S573 | 2276 | F6-F1 | C-N | 2-1 | SLEEEWAQIESEVWGRSESFYDWFERQLG | 3.6 * 10−11 | +++ |
| S574 | 2277 | F6-F1 | C-N | 2-1 | SLEEEWAQIEAEVWGRGAPSESFYDWFERQLG | 9.2 * 10−12 | ++++ |
| S575 | 2278 | F6-F1 | C-N | 2-1 | SLEEEWAQIEAEVWGRAPSESFYDWFERQLG | | |
| S576 | 2279 | F6-F1 | C-N | 2-1 | SLEEEWAQIEAEVWGRGASESFYDWFERQLG | | |
| S577 | 2280 | F6-F1 | C-N | 2-1 | SLEEEWAQIEAEVWGRSESFYDWFERQLG | | |
| S578 | 2281 | F6-F1 | C-N | 2-1 | SLEEEWAQIECEVYGRGCSESFYDWFERQLG | | |
| S579 | 2282 | F6-F1 | C-N | 2-1 | SLEEEWAQIECEVYGRGCSESFYDWFERQLG | | |
| S580 | 2283 | F6-F1 | C-N | 2-1 | SLEEEWAQVECEVYGRGC-βturn-ESFYDWFERQLG | 1.2 * 10−11 | ++++ |
| | 2284 | | | | | | |
| S581 | 2285 | F6-F1 | C-N | 2-1 | SLEEEWAQIESEVWGR-βturn-ESFYDWFERQLG | 1.2 * 10−11 | +++ |
| | 2286 | | | | | | |
| S582 | 2287 | F6-F1 | C-N | 2-1 | SLEEEWAQIECEVWGRGCPKGFYGWFRRRG | 2.5 * 10−9 | |
| S583 | 2288 | F6-F1 | C-N | 2-1 | ELEEEWAQIECEVWGRGCPKGFYGWFRRRGK | | |
| S584 | 2289 | F6-F1 | C-N | 2-1 | SLEEEWAQIECEVWGRGCPKGFYGWFRRRRG | 9.3 * 10−9 | |
| S585 | 2290 | F6-F1 | C-N | 2-1 | SLEREWAQIECEVWGRGCSESFYDWFERQL | | |
| S586 | 2291 | F6-F1 | C-N | 2-1 | SLEEEWAQIECEVWGRGCPSESFYDWFERQL | | |
| S587 | 2292 | F6-F1 | C-N | 2-1 | ELEEEWAQIECEVWGRGCPKGFYGWFRRRRGK | | |
| S588 | 2293 | F6-F1 | C-N | 2-1 | LEEEWAQVECEV-IodoTyr-GRGCSGSLDESFYDWFERQLG | 1.8 * 10−10 | ++++ |
| | 2294 | | | | | | |
| S589 | 2295 | F6-F1 | C-N | 2-1 | LEEEWAQVECEVYGRGCSGSLDESFY-IodoTyr-DWFERQLG | | |
| | 2296 | | | | | | |
| S590 | 2297 | F6-F1 | C-N | 2-1 | LEEEWAQIECEV-IodoTyr-GRGCSGSLDESFYDWFERQLG | 5.8 * 10−11 | +++++ |
| | 2298 | | | | | | |
| S591 | 2399 | F6-F1 | C-N | 2-1 | LEEEWAQIECEVWGRGCSGSLDESF-IodoTyr-DWFERQLG | 1.3 * 10−10 | ++++ |
| | 2300 | | | | | | |
| S592 | 2301 | F6 | | 2 | SLEEEWAQIECEVWGRGCPSY | 1.7 * 10−9 | |
| S593 | 2302 | F6 | | 2 | SIEEEWAQIKCDVWGRGCPSY | 2.2 * 10−9 | |
| S594 | 2303 | F6-F1 | C-N | 2-1 | SLEEEWAQIECEVWGRCWHHSFYDWFERQL | 7.1 * 10−11 | +++++ |
| S595 | 2304 | F6-F1 | C-N | 2-1 | LEEEWAQIQREVWHSPASESFYDWFERQL | 6.2 * 10−10 | ++++ |
| S596 | 2305 | F6-F1 | C-N | 2-1 | SLEEEWAQIQHELYGPAESESFYDWFERQL | 4.5 * 10−11 | ++++ |
| S597 | 2306 | F6-F1 | C-N | 2-1 | Ac-SLEEEWAQIECEVYGRGCPSESFYDWFERQL | 8.5 * 10−12 | +++++++ |
| S600 | 2307 | F6-F1 | C-N | 2-1 | Ac-SIEEEWAQIKCDVWGRGSESFYDWFERQL | 7.6 * 10−12 | |
| S601 | 2308 | F6-F1 | C-N | 2-1 | SLEEEWAQIQEDLYGANHNESFYDWFERQL | 1.8 * 10−10 | |
| S602 | 2309 | F6-F1 | C-N | 2-1 | SLEEEWAQIQAEVYGNPNSESFYDWFERQL | 3.1 * 10−11 | |
| S603 | 2310 | F6-F1 | C-N | 2-1 | Ac-SLEEEWAQIQEDLYGANHNESFYDWFERQL | 1.5 * 10−11 | |
| S604 | 2311 | F6-F1 | C-N | 2-1 | SLEEEWAQIQCEVWGRGCWRRHFYDWFERQL | | |
| S605 | 2312 | F6-F1 | C-N | 2-1 | SLEEEWAQIQHELWPVEKGESFYDWFERQL | 9.4 * 10−11 | ++++ |
| S606 | 2313 | F6-F1 | C-N | 2-1 | SLEEEWAQIQCEVWGRGCPSESFYDWFERQL | 4.0 * 10−12 | ++++++++ |
| S607 | 2314 | F6-F1 | C-N | 2-1 | SLEEEWAQIQCKLYGRNCKESFYDWFERQL | | |
| S608 | 2315 | F6-F1 | C-N | 2-1 | SLEEEWAQIQCKVWGKCKESFYDWFERQL | | |
| S609 | 2316 | F6-F1 | C-N | 2-1 | SLEEEWAQIQCKLYGRNCKSESFYDWFERQL | | |
| S610 | 2317 | F6-F1 | C-N | 2-1 | SLEEEWAQIQCKLWGKNCKESFYDWFERQL | | |
| S611 | 2318 | F6-F1 | C-N | 2-1 | SLEEEWAQIECEVWGRGCPSESFYDWFERQLPK | | |
| S612 | 2319 | F6-F1 | C-N | 2-1 | HQLEEEWQAIQCELWGRGCPSESFYDWFERQL | | |
| S613 | 2320 | F6-F1 | C-N | 2-1 | HLEEEWSEIQCELWGRGCPSESFYDWFERQL | | |
| S614 | 2321 | F6-F1 | C-N | 2-1 | SLEFEWAQIECEVYGRGCPSEDFYDWFEAQLHA | | |
| S615 | 2322 | F6-F1 | C-N | 2-1 | Ac-SLEFEWAQIECEVYGRGCPSEDFYDWFEAQLHA | | |
| S616 | 2323 | F6-F1 | C-N | 2-1 | HQLEEEWQAIQCELWGRGCPSEDFYDWFEAQLHA | | |
| S617 | 2324 | F6-F1 | C-N | 2-1 | HLEEEWSEIQCELWGRGCPSEDFYDWFEAQLHA | | |
| S618 | 2325 | F6-F1 | C-N | 2-1 | HELEEEWKRIECELWGRGCPSEDFYDWFEAQLHA | | |
| S619 | 2326 | F6-F1 | C-N | 2-1 | Ac-HQLEEEWQAIQCELWGRGCPSEDFYDWFEAQLHA | | |
| S620 | 2327 | F6-F1 | C-N | 2-1 | Ac-HLEEEWSEIQCELWGRGCPSEDFYDWFEAQLHA | | |
| S621 | 2328 | F6-F1 | C-N | 2-1 | Ac-HELEEEWKRIECELWGRGCPSEDFYDWFEAQLHA | | |
| S622 | 2329 | F6-F1 | C-N | 2-1 | SLEEEWAQIECEVWGRGCPSESFYDWFERQLG | | |
| S623 | 2330 | F6-F1 | C-N | 2-1 | Ac-SLEEEWAQIECEVWGRGCPSESFYDWFERQLG | | |
| S624 | 2331 | F6-F1 | C-N | 2-1 | SLEEEWAQVECEV-(3-iodo-Tyr)-GRGCPSGSLDESFYDWFE | | |
| | 2332 | | | | RQLG-NH2 | | |
| S625 | 2333 | E8 | | 1 | KVRGFQGGTVWPGYEWLRNAAKK | | |
| S626 | 2334 | F6-E8 | C-N | 2-1 | SLEEEWAQIECEVYGRGCPSVRGFQGGTVWPGYEWLRNAA | | |
| S627 | 2335 | F6-F1 | C-N | 2-1 | Ac-SLEEEWAQIQHELWPVEKGESFYDWFERQL | | |
| S628 | 2336 | F6-F1 | C-N | 2-1 | Ac-HGLEEEWAQIQHELWPVEKGESFYDWFEAQLHA | | |
| S629 | 2337 | F6-F1 | C-N | 2-1 | HLEEEWRQIQCELWGRGCPSESFYDWFERQL | | |
| S630 | 2338 | F6-F1 | C-N | 2-1 | Ac-HLEEEWRQIQCELWGRGCPSESFYDWFEAQLHA | | |
| S631 | 2339 | F6-F1 | C-N | 2-1 | HPLEEEWSQIQCELWGRGCPSESFYDWFERQL | | |
| S632 | 2340 | F6-F1 | C-N | 2-1 | Ac-HPLEEEWSQIQCELWGRGCPSESFYDWFEAQLHA | | |
| S633 | 2341 | F6-F1 | C-N | 2-1 | HGLEEEWAQIQCEVWGRGCPSESFYDWFEAQLHA | | |
| S634 | 2342 | F6-F1 | C-N | 2-1 | Ac-SLEEEWAQIQCEVWGRGCPSESFYDWFEAQLHA | | |
| S635 | 2343 | F6-F1 | C-N | 2-1 | Ac-SLEEEWAQIECEVYGRGCPSEDFYDWFEEQLHN | | |
| S636 | 2344 | F6-F1 | C-N | 2-1 | Ac-SLEEEWAQIQCEVWGRGCPSESFYDWFERQL | | |
| S637 | 2345 | F6-F2 | C-N | 2-1 | Ac-SLEEEWAQIECEVYGRGCPSDGFYNAIELLS | | |
| S638 | 2346 | F6-F1 | C-N | 2-1 | Ac-HGLEEEWAQIQCEVWGRGCQRPEPFYDWFEAQLHA | | |
| S639 | 2347 | F6-F1 | C-N | 2-1 | Ac-HGLEEEWAQIQCEVWGRGCPSESFYDWFEAQLHA | | |
| S640 | 2348 | F6 | | 2 | SLEEEWAQIQHELWPVEAGESY | | |
| S641 | 2349 | F6-F1 | C-N | 2-1 | Ac-SLEEEWAQIQAEVWGRGAPSESFYDWFEAQLHA | | |
| S642 | 2350 | F6-F1 | C-N | 2-1 | Ac-SLEEEWAQIQCEVWGRGCQRPEPFYDWFERQL | | |
| S643 | 2351 | F6-F1 | C-N | 2-1 | Ac-SLEEEWAQIQCELWGRGCPSESFYDWFERQL | | |
| S644 | 2352 | F6-F1 | C-N | 2-1 | SLEEEWAQHEEDVYHPPAESFYDWFERQL | | |
| S645 | 2353 | F6-F1 | C-N | 2-1 | Ac-HGLEEEWAQHEEDVYHPPAESFYDWFEAQLHA | | |
| S646 | 2354 | F6-F1 | C-N | 2-1 | Ac-SLEEEWAQIQCEVWGRGCHNHLPFYDWFERQL | | |
| S647 | 2355 | F6-F1 | C-N | 2-1 | Ac-SLEEEWAQIQCEVWGRGCPSEPFYDWFAHDNGD | | |
| S648 | 2356 | F6-F1 | C-N | 2-1 | Ac-SLEEEWAQIQCEVWGRGCPSEAFYDWFAEQLDD | | |
| 7, 9, 12, 13, 14, 17, 19, 20, 21, 22, 23, and 24 represent specific chemical linkers (see Table 3); For FFC: 0 is no effect, + is agonist, − is antagonist. Peptides listed on 3 lines consist of two different peptides, linked N-N or C-C, either by chemical linkage or by being synthesized on the two branches of an amino acid with two amino groups such as, e.g., lysine. Acy = 1-amino-1-cyclohexanecarboxylic acid; Cha = cyclohexylalanine; Aib = 2-aminoisobutyric acid; | | | | | | | |
| #Hyp = Hydroxyproline; Amino acids which are not capitalized are D-amino acids; Lig = Diaminopropionic acid with a 2-aminohydroxyacetyl group (CO-CH2-O-NH2) on the side chain amino group; Lig′ = lysine with a 2-aminohydroxyacetyl group (CO-CH2-O-NH2) on the side chain amino group; Ald = an aldehyde group obtained by periodate oxidation of a serine, either N-terminal or attached to the side chain amino group of lysine. | | | | | | | |

[0342] Results further indicated that S175-S175 dimer peptides (Site 1-Site 1) were less agonistic than S175 monomer peptides (++vs. +++). S175-S175 dimer peptides having a C—N linkage were less agonistic or equally agonistic as compared to S175-S175 dimer peptides having C—C or N—N linkages. F8-F8 dimer peptides, like the parent monomer, showed no agonist activity.

[0343] Table 7 further indicates that, relative to peptide S519, a potent insulin mimetic, the alterations that are most influential in increasing receptor affinity and potency are: acetylation of the N-terminal amino group; replacing V at position 9 with I; replacing E at position 10 with Q; replacing Y at position 14 with W; and deleting the sequence GSLD at positions 21 to 24.

### Example 5

### Substrate Phosphorylation Assay (HIR Kinase)

[0344] WGA (wheat germ agglutinin)-purified recombinant human insulin receptor was mixed with either insulin or peptide in varying concentrations in substrate phosphorylation buffer (50 mM HEPES (pH 8.0), 3 mM MnCl₂, 10 mM MgCl₂, 0.05% Triton X-100, 0.1% BSA, 12.5 μM ATP). A synthetic biotinylated substrate peptide (Biotin-KSRGDYMTMQIG) was added to a final concentration of 2 μg/ml. Following a 1 hr incubation at RT, the reactions were stopped by the addition of 50 mM EDTA. The reactions were transferred to Streptavidin coated 96-well microtiter plates (NUNC, Cat. No. 236001) and incubated for 1 hr at RT. The plates were washed 3 times with TBS (10 mM Tris (pH 8.0), 150 mM NaCl).

[0345] Subsequently, a 2000-fold dilution of horseradish peroxidase (HRPO) conjugated phosphotyrosine antibody (Transduction Laboratories, Cat. No. E120H) in TBS was added. The plates were incubated for 30 min and washed 3 times with TBS. TMB (3,3′,5,5′-tetramethylbenzidine; Kem-En-Tec, Copenhagen, Denmark) was added. One substrate from Kem-En-Tec was added. After 10-15 min, the reaction was stopped by the addition of 1% acetic acid. The absorbance, representing the extent of substrate phosphorylation, was measured in a spectrophotometer at a wavelength of 450 nM.

[0346] The results indicated that the potency of the Site 1-Site 2 dimer, peptide 539, was 0.1 to 1% of that of insulin in all assays tested (Table 8), and the dose-response curves (FIGS. 17A-17B) had a shape similar to that of insulin dose-response curves, suggesting an insulin-like action mechanism. In addition, Site 1-Site 2 dimer peptides 537 and 538 were also active as specific insulin receptor antagonists (Table 8; FIGS. 16A-16C). Notably, Site 2-Site 1 dimer peptide 539 was more active in the kinase assay than Site 1-Site 1 homodimer peptides 521 and 535 (FIGS. 19A-19B), despite lower FFC potency (FIGS. 14A-14C; FIGS. 17A-17B). Similar results are shown in FIGS. 20A-B and FIGS. 21A-B. This data suggested that homodimer and heterodimer peptides used different mechanisms of action.

TABLE 8

| | | | | | | | | | |
|---|---|---|---|---|---|---|---|---|---|
| | | | SEQ | | | HIR | HIGF- | FFC | Kinase |
| | Mon./ | | ID | | Site | Kd | 1R kd | Pot. | Pot. |
| Pep. | Link. | Sequence | NO: | Form | IR | (nM) | (nM) | (nM) | (nM) |

| | | | | | | | | | |
|---|---|---|---|---|---|---|---|---|---|
| HI | | | | na | na | | | | |
| HIGF-1R | | | | na | na | | | | |
| 521 | RP9- | MADYKDDDDKGSLDESFYDWF | 2112 | 1-1 | 1-1 | 25 | - | A 3 | 1400 |
| | 6aa- | ERQLGKKGGSGGSGSLDESFY | | | | | | | |
| | RP9 | DWFERQLGKKAAA(ETAG)PG | | | | | | | |
| 535 | RP9- | MADYKDDDDKGSLDESFYDWF | 2113 | 1-1 | 1-1 | 15 | - | A 2 | 1000 |
| | 12aa- | ERQLGKKGGSGGSGGSGGSGS | | | | | | | |
| | RP9 | LDESFYDWFERQLGKKAAA | | | | | | | |
| | | (ETAG)PG | | | | | | | |
| 537 | RP9- | MADYKDDDDKGSLDESFYDWF | 2114 | 1-6 | 1-2 | 0.092 | 980 | N 10 | Inactive |
| | 6aa- | ERQLGKKGGSGGSWLDQEWAW | | | | | | | |
| | D8 | VQCEVYGRGCPSAAA(ETAG) | | | | | | | |
| | | PG | | | | | | | |
| 538 | RP9- | MADYKDDDDKGSLDESFYDWF | 2115 | 1-6 | 1-2 | 0.080 | 710 | N 10 | Inactive |
| | 12aa- | ERQLGKKGGSGGSGGSGGSWL | | | | | | | |
| | D8 | DQEWAWVQCEVYGRGCPSAAA | | | | | | | |
| | | (ETAG)PG | | | | | | | |
| 539 | D8- | MADYKDDDDKWLDQEWAWVQC | 2116 | 6-1 | 2-1 | 0.530 | 1500 | A 10 | 110 |
| | 6aa- | EVYGRGCPSGGSGGSGSLDES | | | | | | | |
| | RP9 | FYDWFERQLGKKAAA(ETAG) | | | | | | | |
| | | PG | | | | | | | |

A = agonist; N = antagonist; na = not applicable; Form. = formula; Mon. = constituent monomers; Link. = linker; Pot. = potency; HI and HIGF-1R are controls; All with tags at both ends; All dimers are linked C-N; Linker sequences are underlined.

### Example 6

### IR Autophosphorylation Assays

[0347] IR activation was assayed by detecting autophosphorylation of an insulin receptor construct transfected into 32D cells (Wang et al., 1993, Science 261:1591-1594; clone 969). The IR transfected 32D cells were seeded at 5×10⁶ cells/well in 96-well tissue culture plates and incubated overnight at 37° C. Samples were diluted 1:10 in the stimulation medium (PRIM1640 with 25 nM HEPES pH 7.2) plus or minus insulin. The culture media was decanted from the cell culture plates, and the diluted samples were added to the cells. The plates were incubated at 37° C. for 30 min. The stimulation medium was decanted from the plates, and cell lysis buffer (50 mM HEPES pH 7.2, 150 mM NaCl, 0.5% Triton X-100, 1 mM AEBSF, 10 KIU/ml aprotinin, 50 μM leupeptin, and 2 mM sodium orthovanadate) was added. The cells were lysed for 30 min.

[0348] In the ELISA portion of the assay, the cell lysates were added to the BSA-blocked anti-IR unit mAb (Upstate Biotechnology, Lake Placid, N.Y.) coated ELISA plates. After a 2 hr incubation, the plates were washed 6 times with PBST and biotinylated anti-phosphotyrosine antibody (Upstate Biotechnology) is added. After another 2 h incubation, the plates were again washed 6 times. Streptavidin-Eu was then added, and the plates were incubated for 1 h. After washing the plates again, EG&G Wallac enhancement solution (100 mM acetone-potassium hydrogen pthalate, pH 3.2; 15 mM 2-naphtyltrifluoroacetate; 50 mM tri(n-octyl)-phosphine oxide; 0.1% Triton X-100) was added into each well, and the plates were placed onto a shaker for 20 min at RT. Fluorescence of samples in each well was measured at 615 nm using a VICTOR1420 Multilabel Counter (EG&G Wallac).

[0349] Alternatively, IR autophosphorylation was determined using a holoenzyme phosphorylation assay. In accordance with this assay, 1 μl of purified insulin receptor (isolated from a Wheat Germ Agglutinin Expression System) was incubated with 25 nM insulin, or 10 or 50 μM peptide in 50 μl autophosphorylation buffer (50 mM HEPES pH. 8.0, 150 mM NaCl, 0.025% Triton-X-100, 5 mM MnCl₂, 50 μM sodium orthovanadate) containing 10 μM ATP for 45 min at 22° C. The reaction was stopped by adding 50 μl of gel loading buffer containing β-mercaptoethanol (Bio-Rad Laboratories, Inc., Hercules, Calif.). The samples were run on 4-12% SDS-polyacrylamide gels. Western Blot analysis was performed by transferring the proteins onto nitrocellulose membrane. The membrane was blocked in PBS containing 3% milk overnight. The membrane was incubated with anti-phosphotyrosine 4G10 HRP labeled antibody (Upstate Biotechnology) for 2 h. Protein bands were visualized using SuperSignal West Dura Extended Duration Substrate Chemiluminescence Detection System (Pierce Chemical Co.).

### Example 7

### Fluorescence-Based HIR Binding Assays

[0350] A. Time-Resolved Fluorescence Resonance Energy Transfer Assays

[0351] Time-resolved fluorescence resonance energy transfer assays (TR-FRET) were used for peptide competition studies. In one set of assays, monomer and dimer peptides were tested for the ability to compete with biotinylated RP-9 monomer peptide (b-RP9) for binding to HIR-immunoglobulin heavy chain chimera (sIR-Fc; Bass et al., 1996). The assays were performed using a 384-well white microplate (NUNC) with a final volume of 30 μl. Final incubation conditions were in 22 nM b-RP9, 1 nM SA-APC (streptavidin-allophycocyanin), 1 nM Eu³⁺-sIR-Fc (LANCE™ labeled, PE Wallac, Inc.), 0.05 M Tris-HCl (pH 8 at 25° C.), 0.138 M NaCl, 0.0027 M KCl, and 0.1% BSA (Cohn Fraction V). After 16-24 hr of incubation at RT, the fluorescence signal at 665 nm and 620 nm was read on a Victor² 1420 plate reader (PE Wallac, Inc.). Primary data were background corrected, normalized to buffer controls, and then expressed as percent of specific binding.

[0352] Results are shown in FIGS. 22A-22B. FIG. 21A shows b-RP9 competition data. For these figures, the Z′-factor was greater than 0.5 (Z′=1−(3σ₊+3σ₋)/|μ₊−μ₋|; Zhang et al., 1999, J. Biomol. Screen. 4:67-73), and the signal-to-background (S/B) ratio was ˜4-5. In FIG. 22A, each data point represents the average of two replicate wells. The lines represent the best fit to a four-parameter non-linear regression analysis of the data according to the following formula: y=min+(max−min)/(1+10ˆ((logIC₅₀−x)*Hillslope)). This was used to determine IC₅₀ values.

[0353] In another set of assays, monomer and dimer peptides were tested for the ability to compete with biotinylated-S175 (b-S175) or b-RP9 for binding to sIR-Fc. The TR-FRET assays were performed in a 384-well white microplate with a final volume of 30 μl. Final incubation conditions were in 33 nM b-S175 or 22 nM b-RP9, 1 nM SA-APC, 1 nM Eu³⁺-sIR-Fc, 0.05 M Tris-HCl (pH 8 at 25° C.), 0.138 M NaCl, 0.0027 M KCl, and 0.1% BSA. After 16-24 hr of incubation at RT, the fluorescence signal at 665 nm and 620 nm was read on a Victor² 1420 plate reader. Primary data were background corrected, normalized to buffer controls, and then expressed as % Specific Binding.

[0354] Results are shown in FIGS. 23A-23B. For these figures, each data point represents the average of two replicate wells. The lines represent the best fit to a four-parameter non-linear regression analysis of the data, which was used to determine IC₅₀ values. FIG. 23A shows b-S175 competition data; FIG. 23B shows b-RP9 competition data.

[0355] B. Fluorescence Polarization Assays

[0356] Fluorescence polarization assays (FP) were used for peptide competition studies. In one set of assays monomer and dimer peptides were tested for the ability to compete with fluorescein-RP-9 (FITC-RP9) for binding to soluble HIR ectodomain (sIR; Kristensen et al., 1998, J. Biol. Chem. 273:17780-17786). The assays were performed in a 384-well black microplate (NUNC) with a final volume of 30 μl. Final incubation conditions were 1 nM FITC-RP9, 10 nM sIR, 0.05 M Tris-HCl (pH 8 at 25° C.), 0.138 M NaCl, 0.0027 M KCl, 0.05% BGG (bovine gamma globulin), 0.005% Tween-20. After 16-24 hr of incubation at RT, the fluorescence signal at 520 nm was read on an Analyst™ AD plate reader (LJL BioSystems, Inc.). Primary data were background corrected using 10 nM sIR without FITC-RP9 addition, normalized to buffer controls, and then expressed as percent of specific binding. The Z′-factor was greater than 0.5 and the assay dynamic range was ˜125 mP. In FIGS. 24-27, each data point represents the average of two replicate wells. The lines represent the best fit to a four-parameter non-linear regression analysis of the data, which was used to determine IC₅₀ values. The Z′-factor was greater than 0.5 and the assay dynamic range was ˜125 mP. Results are shown in FIGS. 24A-24B.

[0357] In another set of assays, monomer and dimer peptides were tested for the ability to compete with FITC-RP9 for binding to soluble human insulin mini-receptor (mIR; Kristensen et al., 1999, J. Biol. Chem. 274:37351-37356). The FP assays were performed in a 384-well black microplate with a final volume of 30 μl. Final incubation conditions were 2 nM FITC-RP9, 20 nM mIR, 0.05 M Tris-HCl (pH 8 at 25° C.), 0.138 M NaCl, 0.0027 M KCl, 0.001% BGG, 0.005% Tween-20. After 16-24 hr of incubation at RT, the fluorescence signal at 520 nm was read on an Analyst™ AD plate reader. Primary data were background corrected using 20 nM mIR without FITC-RP9 addition, normalized to buffer controls and then expressed as percent of specific binding. Results are shown in FIGS. 25A-25B.

[0358] Monomers and dimer peptides were also tested for the ability to compete with fluorescein-insulin (FITC-Insulin) for binding to sIR. The FP assays were performed in a 384-well black microplate with a final volume of 30 μl. Final incubation conditions were in 2 nM FITC-Insulin, 20 nM sIR, 0.05 M Tris-HCl (pH 8 at 25° C.), 0.138 M NaCl, 0.0027 M KCl, 0.05% BGG, 0.005% Tween-20. After 16-24 hr of incubation at RT, the fluorescence signal at 520 nm was read on an Analyst™ AD plate reader. Primary data were background corrected using 20 nM sIR without FITC-Insulin addition, normalized to buffer controls and then expressed as percent of specific binding. Results are shown in FIGS. 26A-26B.

[0359] In other assays, peptide monomers and dimer peptides were tested for the ability to compete with FITC-Insulin for binding to mIR. The FP assays were performed in a 384-well black microplate with a final volume of 30 μl. Final incubation conditions were 2 nM FITC-Insulin, 20 nM mIR, 0.05 M Tris-HCl (pH 8 at 25° C.), 0.138 M NaCl, 0.0027 M KCl, 0.05% BGG (bovine gamma globulin), 0.005% Tween-20. After 16-24 hr of incubation at RT, the fluorescence signal at 520 nm was read on an Analyst™ AD plate reader. Primary data were background corrected using 20 nM mIR without FITC-RP9 addition, normalized to buffer controls and then expressed as % Specific Binding. Results are shown in FIGS. 27A-27B.

### SUMMARY

[0360] Table 9, below, summarizes the binding data calculated from competition assays using the IR constructs, sIR-Fc, sIR, and mIR, in TR-FRET and FP formats. The data in Table 9 indicate that most dimer peptides (e.g., S291 and S375 or S337), showed greater agonist activity than the corresponding monomer peptides (e.g., H2C or RP9, respectively) in the FFC assay. It was previously demonstrated that an inequality between monomer peptides and insulin was exhibited in competition assays where the assay reporter was a monomer peptide (i.e., RP9 or S175). This inequality was also demonstrated by dimer peptides as seen in Table 9. Table 9 further shows that Group 6 monomer peptides such as E8 (D120) were able to compete with FITC-RP9 or b-RP9 peptides for binding to sIR-Fc, but did not compete peptide ligands, such as FITC-RP9 for binding to mIR. Experiments using different IR constructs thereby allowed differentiation of Site I peptides based on sequence motifs (i.e., Group 6 (Formula 10) vs. Group 1 (Formula 1; A6)).

TABLE 9

| | | | | | | | | | HIR |
|---|---|---|---|---|---|---|---|---|---|
| | | | | sIR-Fc | sIR-Fc | sIR-Fc | sIR | mIR | ¹²⁵I- |
| | | | | b-S175 | b-RP9 | FITC-RP9 | FITC-RP9 | FITC-RP9 | insulin |
| Monomer | SEQ | | TARGET□ | FRET | FRET | FP | FP | FP | RRA |
| or | ID | Link- | Label□ | IC50 | IC50 | IC50 | IC50 | IC50 | IC50 |

| Dimer | NO: | age | Sequence | (nM) | Hill | (nM) | Hill | (nM) | Hill | (nM) | Hill | (nM) | Hill | (nM) | FFC |
|---|---|---|---|---|---|---|---|---|---|---|---|---|---|---|---|
| H2C | 2117 | | FHENFYDWFVQRVSKK | 410 | −0.82 | 1626 | −1.03 | 50 | −0.27 | 37 | −0.49 | 770 | −0.89 | 700 | + |
| S291 | 1916 | N-N | (Lig-GGG-H2C)₂-9 | 81 | −0.96 | 250 | −0.69 | | | 12 | −0.35 | 668 | −0.38 | 1200 | ++++ |
| | and | | | | | | | | | | | | | | |
| | 1917 | | | | | | | | | | | | | | |
| RP9 | 1558 | | GSLDESFYDWFERQLGKK | 6 | −0.45 | 42 | −0.69 | 10 | −0.41 | 0.03 | −0.29 | 49 | −0.53 | 44 | +/0 |
| S375 | 1994 | C-N | (RP9-Lig)-14-(RP9-Lig) | 7 | −0.80 | 86 | −0.67 | | | 0.2 | −0.22 | 91 | −0.80 | 200 | ++++ |
| S337 | 1960 | C-C | (RP9-Lig)₂-23 | 0.2 | −0.36 | 14 | −0.57 | 1 | −0.37 | 0.2 | −0.28 | 111 | −0.70 | 11 | +++++ |
| | and | | | | | | | | | | | | | | |
| | 1961 | | | | | | | | | | | | | | |
| S391 | 2008 | | truncated-(-GSLDE)RP9(-KK) | 59 | −0.59 | 610 | −0.56 | | | 119 | −0.49 | 284 | −0.77 | 1500 | NN |
| S390 | 1794 | | truncated(-GSLD)RP9(-KK) | 27 | −0.49 | 127 | −0.49 | | | 19 | −0.64 | 94 | −0.94 | 620 | + |
| S414 | 2015 | C-C | (truncated(-GSLD)RP9(-KK))₂-14 | 92 | −0.62 | 164 | −0.73 | | | 0.2 | −0.25 | 151 | −0.69 | NN | NN |
| | and | | | | | | | | | | | | | | |
| | 2016 | | | | | | | | | | | | | | |
| S175 | 1560 | | GRVDWLQRNANFYDWFVAELG | 22 | −0.58 | 64 | −0.74 | 10 | −0.56 | 1 | −0.36 | 167 | −1.72 | 230 | +++ |
| S380 | 2001 | C-C (EE-short-S175-Lig)₂-9 | 10 | −0.55 | 23 | −0.64 | | | 0.5 | −0.29 | 27 | −0.49 | 510 | ++ | |
| | and | | | | | | | | | | | | | | |
| | 2002 | | | | | | | | | | | | | | |
| E8 | 2118 | | GGTVWPGYEWLRNA | 755 | −0.74 | | | 207 | −0.49 | | | >100000 | | 2200 | − |
| (D120) | | | | | | | | | | | | | | | |
| Insulin | | | | 59 | −0.37 | 63 | −0.46 | >100000 | −0.25 | 1250 | — | 172 | −0.78 | 0.04 | +++++ |

FRET = Time-Resolved Fluorescence Resonance Energy Transfer Assay; FP = Fluorescence Polarization Assay; RRA = Radio-Receptor Assay; FFC = Free Fat Cell Assay; N-N = N-terminal linkage; C-C = C-terminal linkage;; All are site 1 (formula 1) monomers or site 1-site 1 (formula 1-formula 1) dimers;

[0361] Based on the functional studies outlined above, the following peptide dimers were designed.

| SEQ | | |
|---|---|---|
| ID | Monom./ | |
| NO: | Linkers | Sequence |
| 2119 | F8-6aa- | HLCVLEELFWGASLFGYCSGGGSGGSGSLDESFYDWF |
| | RP9 | ERQL |
| 2120 | F8-12aa- | HLCVLEELFWGASLFGYCSGGGSGGSGGSGGSGSLDE |
| | RP9 | SFYDWFERQL |
| 2121 | D8-6aa- | WLDQEWAWVQCEVYGRGCPSGGSGGSGRVDWLQRNAN |
| | S175 | FYDWFVAELG |
| 2122 | D8-12aa- | WLDQEWAWVQCEVYGRGCPSGGSGGSGGSGGSGRVDW |
| | S175 | LQRNANFYDWFVAELG |
| 2123 | F8-6aa- | HLCVLEELFWGASLFGYCSGGGSGGSGRVDWLQRNAN |
| | S175 | FYDWFVAELG |
| 2124 | F8-12aa- | HLCVLEELFWGASLFGYCSGGGSGGSGGSGGSGRVDW |
| | S175 | LQRNANFYDWFVAELG |
| 2125 | D8-6aa- | HLCVLEELFWGASLFGYCSGGGSGGSSQAGSAFYAWF |
| | RP15 | DQVLRTV |
| 2126 | D8-6aa- | HLCVLEELFWGASLFGYCSGGGSGGSTFYSCLASLLT |
| | RP6 | GTPQPNRGPWERCR |
| 2127 | D8-6aa- | HLCVLEELFWGASLFGYCSGGGSGGSQSDAFYSGLWA |
| | RP17 | LIGLSDG |
| 2128 | D8-6aa- | HLCVLEELFWGASLFGYCSGGGSGGSDSDWAGYEWFE |
| | Grp 6 | EQLD |

[0362] Linker sequences are underlined and in bold; Monomer sequences are shown below; All dimers are linked C—N.

| | | | | |
|---|---|---|---|---|
| SEQ | | | | |
| ID | | | | |
| NO: | Monomer | Formula | Site | Sequence |

| | | | | |
|---|---|---|---|---|
| 1576 | F8 | 4 | 2 | HLCVLEELFWGASLFGYCSG |
| 1558 | RP9 | 1 | 1 | GSLDESFYDWFERQL |
| 2129 | D8 | 6 | 2 | WLDQEWAWVQCEVYGRGCPS |
| 1560 | S175 | 1 | 1 | GRVDWLQRNANFYDWFVAELG |
| 2130 | RP15 | 1 | 1 | SQAGSAFYAWFDQVLRTV |
| 1635 | Rp6 | 2 | 1 | TFYSCLASLLTGTPQPNRGPWERC |
| | | | | R |
| 2131 | RP17 | 1 | 1 | QSDAFYSGLWALIGLSDG |
| 1595 | Group 6 | 10 | 1 | DSDWAGYEWFEEQLD |

### Example 8

### Peptide Fusions to the Maltose Binding Protein

[0363] A. Cloning

[0364] The transfer of interesting peptide sequences from phage display to maltose binding protein (MBP) fusions is desirable for several reasons. First, to obtain a more sensitive affinity estimate, the polyvalency of phage display peptides should be converted to a monovalent system. For this purpose, the peptide sequences are fused to MBP that generally exists as a monomer with no cysteine residues. Second, competition experiments can be carried out with the same or different peptides, one phage displayed and the other fused to MBP. Lastly, purified peptides can be obtained by cleavage of the fusion protein at a site engineered in the DNA sequence.

[0365] FIG. 28 shows a schematic drawing of the MBP-peptide construct. In the construct, the N-terminus of the peptide sequence is fused to the C-terminus of the MBP. Two peptide-flanking epitope tags are included, a shortened-FLAG® at the N-terminus and E-Tag at the C-terminus. The corresponding gene fusion was generated by ligating a vector fragment encoding the MBP in frame with a PCR product encoding the peptide of interest. The vector fragment was obtained by digesting the plasmid pMAL-c2 (New England Biolabs) with EcoRI and HindIII and then treating the fragment with shrimp alkaline phosphatase (SAP; Amersham). The digested DNA fragment was resolved on a 1% agarose gel, excised, and purified by QIAEXII (QIAGEN). The 20-amino acid peptide sequences of interest were initially encoded in the phage display vector pCANTAB5E (Pharmacia). To obtain these sequences, primers were synthesized which anneal to sequences encoding the shortened FLAG® or E-Tag epitopes and also contain the required restriction enzyme sites EcoRI and HindIII. PCR products were obtained from individual phage clones and digested with restriction enzymes to yield the insert fragment. The vector and insert were ligated overnight at 15° C. The ligation product was purified using QIAquick spin columns (QIAGEN) and electroporations were performed at 1500 v in an electroporation cuvette (0.1 mm gap; 0.5 ml volume) containing 10 ng of DNA and 40 μl of E. coli strain ER2508 (RR1 lon:miniTn10(Tet^{r}) (malB) (argF-lac)U169 Pro⁺ zjc::Tn5(Kan^{r}) fhuA2) electrocompetent cells (New England Biolabs). Immediately after the pulse, 1 ml of pre-warmed (40° C.) 2xYT medium containing 2% glucose (2xYT-G) was added and the transformants were grown at 37° C. for 1 h. Cell transformants were plated onto 2xYT-AG plates and grown overnight at 37° C. Sequencing confirmed the clones contained the correct constructs.

[0366] C. Small-Scale Expression of Soluble MBP-Peptide Fusion Proteins

[0367] E. coli ER2508 (New England Biolabs) carrying the plasmids encoding MBP-peptide fusion proteins were grown in 2xYT-AG at 37° C. overnight (250 rpm). The following day the cultures were used to inoculate media (2×YT containing-G) to achieve an OD₆₀₀ of 0.1. When the cultures reached an OD₆₀₀ of 0.6, expression was induced by the addition of IPTG to a final concentration of 0.3 mM and then cells were grown for 3 h. The cells were pelleted by centrifugation and samples from total cells were analyzed by SDS-PAGE electrophoresis. The production of the correct molecular weight fusion proteins was confirmed by Western blot analysis using the monoclonal antibody anti-E-Tag-HRP conjugate (Pharmacia).

[0368] Large-Scale Expression of Soluble MBP-Peptide Fusion Proteins

[0369] E. coli ER2508 carrying plasmids encoding the MBP-peptide fusion proteins were grown in 2xYT-AG media for 8 h (250 rpm, 37° C.). The cultures were subcultured in 2xYT-AG to achieve an OD₆₀₀ of 0.1 and grown at 30° C. overnight. This culture was used to inoculate a fermentor with medium of following composition (g/l): glucose (3.00); (NH₄)₂SO₄ 5.00; MgSO₄*7H₂O (0.25); KH₂PO₄ (3.00); citric acid (3.00); peptone (10.00); and yeast extract (5.00); pH 6.8.

[0370] The culture was grown at 700 rpm, 37° C. until the glucose from the medium was consumed (OD₆₀₀=˜6.0-7.0). Expression of the fusion protein was induced by the addition of 0.3 mM IPTG and the culture was grown for 2 h in fed-batch mode fermentation with feeding by 50% glucose at a constant rate of 2 g/l/h. The cells were removed from the medium by centrifugation. Samples of the cell pellet were analyzed by SDS-PAGE followed by the Western blot analysis using the mouse monoclonal antibody anti-E-Tag-HRP conjugate (Pharmacia) to visualize the expressed product.

[0371] Purification

[0372] The cell pellets were disrupted mechanically by sonication or chemically by treatment with the mild detergent Triton X-100. After removal of cell debris by centrifugation, the soluble proteins were prepared for chromatographic purification by dilution or dialysis into the appropriate starting buffer. The MBP fusions were initially purified either by amylose affinity chromatography or by anion exchange chromatography. Final purification was performed using anti-E-Tag antibody affinity columns (Pharmacia). The affinity resin was equilibrated in TBS (0.025 M Tris-buffered saline, pH 7.4) and the bound protein was eluted with Elution buffer (100 mM glycine, pH 3.0). The purified proteins were analyzed for purity and integrity by SDS-PAGE and Western blot analysis according to standard protocols.

[0373] For MBP fusions, IR agonist activity was observed for the Site 1-Site 1 dimer peptides shown in Table 10, below. Additional binding data for the MBP fusions are shown in Table 11, also below.

TABLE 10

| | | | | | | | | | |
|---|---|---|---|---|---|---|---|---|---|
| | | | SEQ | | | | | | |
| | Monomer/ | | ID | | | Site | Fus. | MW | K_{d} |
| Fus. | Linker | Sequence | NO: | Form. | Act. | IR | Conc. | (kDa) | (HIR) |

| 426 | D8 | MBP . . . NNNNLGIEGRISEFIEGR AQPAMA | 2132 | 6 | N | 2 | 0.76 | 52.2 | 1.4 × 10⁻⁶ |
|---|---|---|---|---|---|---|---|---|---|
| | | WLDQEWAWVQCEVYGRGCPSAAA(ETAG)AA | | | | | | | |
| 429 | D8-6AA-D8 | MBP . . . NNNNLGIEGRISEFIEGRAQPAMAWLDQE | 2133 | 6-6 | N-N | 2-2 | 3.2 | 55.3 | 1.3 × 10⁻⁶ |
| | | WAWVQCEVYGRGCPSGGSGGSKWLDQEWAWVQCEVYGRG | | | | | | | |
| | | CPSAAA(ETAG)AA | | | | | | | |
| 430 | H2C-4aa-RB6 | MBP . . . NNNNLGIEGRISEFIEGRDYKDDDDKFHE | 2134 | 1-6 | A- | 1-1 | 0.17 | 54.5 | 2.1 × 10⁻⁶ |
| | | NFYDWFVRQVSGSGSLDALDRLMRYFEERPSLETAG | | | | | | | |
| 431 | H2C-6aa-F8 | MBP . . . NNNNLGIEGRISEFIEGRDYKDDDKFHEN | 2135 | 1-4 | A-N | 1-2 | 3.3 | 54.8 | 4.7 × 10⁻⁸ |
| | | FYDWFVRQVSGGSGGSHLCVLEELFWGASLFGYCSGAAA | | | | | | | |
| | | (ETAG)AA | | | | | | | |
| 432 | H2C-12aa-F8 | MBP-NNNNLGIEGRISEFIEGRDYKDDDKFHENFYDWFV | 2136 | 1-4 | A-N | 1-1 | 2.9 | 55.5 | 3.5 × 10⁻⁸ |
| | | RQVSGGSGGSGGSGGS HLCVLEELFWGASLFGYCSGAA | | | | | | | |
| | | A(ETAG)AA | | | | | | | |
| 433 | H2C-9aa-F8 | MBP . . . NNNNLGIEGRISEFIEGRDYKDDDKFHEN | 2137 | 1-4 | A-N | 1.2 | 2.8 | 55.2 | 2.1 × 10⁻⁸ |
| | | FYDWFVRQVSGGSGGSGGSHLCVLEELFWGASLFGYCSG | | | | | | | |
| | | AAA(ETAG)AA | | | | | | | |
| 434 | G3-12aa-G3 | MBP . . . NNNNLGIEGRISEFIEVRAQPAMARGGGT | 2138 | 1-1 | N-N | 1-1 | 0.01 | 56 | 3.2 × 10⁻⁶ |
| | | FYEWFESALRKHGAGGGSGGSGGSGGSRGGGTFYEWFES | | | | | | | |
| | | ALRKHGAGAAA(ETAG)AA | | | | | | | |
| 436 | H2C-9aa-H2C | MBP . . . NNNNLGIEGRISEFIEGRAQPAMAFHENF | 2139 | 1-1 | A | 1-1 | 1.1 | 54.2 | 4.1 × 10⁻⁷ |
| | | YDWFVRQVSGGSGGSGGSFHENFYDWFVRQVSAAA | | | | | | | |
| | | (ETAG)AA | | | | | | | |
| 437 | H2C | MBP . . . NNNNLGIEGRISEFIEGRAQPAMA | 2140 | 1 | N-N | 1 | 0.3 | 51.5 | 8.3 × 10⁻⁶ |
| | | FHENFYDWFVRQVSAAA(ETAG)AA | | | | | | | |
| 427 | G3-6aa-G3 | MBP . . . NNNNLGIEGRISEFIEGRAQPAMARGGGT | 2141 | 1-1 | N-N | 1-1 | 0.02 | 55.36 | 3.3 × 10⁻⁶ |
| | | FYEWFESTLRKHGAGGGSGGSRGGGTFYEWFESALRKHG | | | | | | | |
| | | AGAAA(ETAG)AA | | | | | | | |
| 435 | H2C-3aa- | MBP . . . NNNNLGIEGRISEFIEGRAQPAMAFHENF | 2142 | 1-1-1 | A-A-A | 1-1-1 | 2.1 | 55.5 | 2.0 × 10⁻⁶ |
| | H2C-3aa- | YDWFVRQVSGGSFHENFYDWFVRQVSGGSFHENFYDWFV | | | | | | | |
| | H2C | RQVSAAA(ETAG)AA | | | | | | | |
| 439 | H2C-6aa-H2C | MBP . . . NNNNLGIEGRISEFIEGRAQPAMAFHENF | 2143 | 1-1 | A-A | 1-1 | 1.4 | 53.9 | 5.5 × 10⁻⁷ |
| | | YDWFVRQVSGGSGGSFHEN FYDWFVRQVS(ETAG)AA | | | | | | | |
| 449 | H2C-12aa-H2C | MBP . . . NNNNLGIEGRISEFIEGRAQPAMAFHENF | 2144 | 1-1 | | 1-1 | 1.5 | 51.8 | 6.2 x 10⁻⁷ |
| | | YDWFVRQVSGGSGGSGGSGGSAQPAMAFHENFYDWFVRQ | | | | | | | |
| | | VSAAA(ETAG)AA | | | | | | | |
| 452 | G3 | MBP . . . NNNNLGIEGRISEFIEGRAQPAMARGGGT | 2145 | 1 | | 1 | 0.15 | 48.8 | 7.8 × 10⁻⁷ |
| | | FYEWFESALRKHGAGAAA(ETAG)AA | | | | | | | |
| 463 | H2C-3aa-H2C | MBP . . . NNNNLGIEGRISEFIEGRAQPAMAFHENF | 2146 | 1-1 | A-A | 1-1 | 1.8 | 50.1 | 9.6 × 10⁻⁷ |
| | | YDWFVRQVSGGSFHENFYDWFVRQVSAAA(ETAG)AA | | | | | | | |
| 464 | LF-H2C | MBP . . . NNNNLGIEGRISEFIEGRDYKDDDDK | 2147 | 1 | | 1 | 0.045 | 48.4 | 3.9 × 10⁻⁸ |
| | | FHENFYDWFVRQVSAA(ETAG)AA | | | | | | | |
| 446 | LF-F8 | MBP . . . NNNNLGIEGRISEFIEGRDYKDDDDKHLC | 2148 | 1 | | 2 | 1.9 | 49.1 | 7.7 × 10⁻⁷ |
| | | VLEELFWGASLFGYCSGAAA(ETAG)AA | | | | | | | |
| 459 | SF-RB6 | MBP . . . NNNNLGIEGRISEFGSADYKDLDALDRLM | 2149 | 3 | | 1 | 0.069 | 48.1 | 7.7 × 10⁻⁸ |
| | | RYFEERPSLAAA(ETAG)AA | | | | | | | |
| MBP* | IacZ | ** | | na | | | 5.1 | 50 | >1 × 10⁻⁵ |
| *MBP (negative control for the fusions) is fused to a small fragment of beta-galactosidase (IacZ); **MBP-IacZ fusion protein was derived from the plasmid pMal-c2 as purchased form NEB. Fus. = fusion; Act. = activity; Conc. = concentration; N = Antagonist; A = Agonist; LF = Long FLAG ® epitope (DYKDDDDK; SEQ ID NO:1777); SF = Short FLAG ® epitope (DYKD; SEQ ID NO:1545); na = not applicable; Form. = formula; All dimers are | | | | | | | | | |
| #linked C-N; Linker sequences are underlined. | | | | | | | | | |

[0374] TABLE 11

| | | | | | | | |
|---|---|---|---|---|---|---|---|
| | | | | | | High | |
| | | | SEQ | | | conc. | Kd |
| | Monomer/ | | ID | | Site | tested | (HIR) |
| Fusion | Linker | Sequence | NO: | Form | IR | (μM) | μM |

| 431− | H2C-6aa-F8 | MBP . . . NNNNLGIEGRISEFIEGRDYKDDDKFHENFYDWFVRQVSGGSG | 2150 | 1-6 | 1-2 | 0.2 | 0.033 |
|---|---|---|---|---|---|---|---|
| | | GSHLCVLEELFWGASLFGYCSGAAA(ETAG)AA | | | | | |
| 431+ | H2C-6aa-F8 | DYKDDDKFHENFYDWFVRQVSGGSGGSHLCVLEELFWGASLFGYCS | 2151 | 1-6 | 1-2 | 0.2 | 0.0074 |
| | | GAAA(ETAG)AA | | | | | |
| 432− | H2C-12aa-F8 | MBP . . . NNNNLGIEGRISEFIEGRDYKDDDKFHENFYDWFVRQVSGGSG | 2152 | 1-6 | 1-2 | 0.2 | 0.02 |
| | | GSGGSGGSHLCVLEELFWGASLFGYCSGAAA(ETAG)AA | | | | | |
| 432+ | H2C-12aa-F8 | DYKDDDKFHENFYDWFVRQVSGGSGGSGGSGGSHLCVLEELFWGAS | 2153 | 1-6 | 1-2 | 0.2 | 0.0038 |
| | | LFGYCSGAAA(ETAG)AA | | | | | |
| 433− | H2C-9aa-F8 | MBP . . . NNNNLGIEGRISEFIEGRDYKDDDKFHENFYDWFVRQVSGGSG | 2154 | 1-6 | 1-2 | 0.2 | 0.03 |
| | | GSGGSHLCVLEELFWGASLFGYCSGAAA(ETAG)AA | | | | | |
| 433+ | H2C-9aa-F8 | DYKDDDK FHENFYDWFVRQVSGGSGGSGGS | 2155 | 1-6 | 1-2 | 0.2 | 0.004 |
| | | HLCVLEELFWGASLFGYCSGAAA(ETAG)AA | | | | | |
| The concentrations of these fusions vary depending on the expression quality. There are 2 sets of each fusion: uncleaved (−) and cleaved with factor Xa (+). The fusion proteins are in Tris buffer (20 mM Tris, 200 mM NaCI, 1 mM EDTA, 50 mM maltose, pH 7.5) and the cleaved fusions (+) are in the same Tris buffer (500 μl) + 12 μg Factor Xa. (Source of Factor Xa: New England Biolabs). Conc. = concentration; Form. = formula; All dimers are linked C-N; Linker sequences | | | | | | | |
| are underlined. | | | | | | | |

[0375] The A7 (20A4), D8, and D10 peptide sequence are shown in FIGS. 8 and 9A-9B. The 447 peptide sequence is: LCQRLGVGWPGWLSGWCA (SEQ ID NO:2156).

TABLE 13
BIAcore Results - Synthetic peptides compete for binding to IR

| | | Result | |
|---|---|---|---|
| Incubation Mix | % Binding | (RUs) | Sequence Type |
| IR | 100 | 128 | Positive control |
| IR + 20D1 | 41 | 51.8 | Formula 1 Motif |
| IR + D8 | 33 | 41.6 | Formula 6 Motif |
| IR + 20C11 | 38 | 49 | Formula 2 Motif (bkg high) |
| IR + H2 | 27 | 34.6 | IGF (phosphorylated |
| | | | band) |
| IR + 2A9 | 100 | 128 | IGF(bkg high) |
| IR + 20A4 | 33 | 41.8 | Formula 6 Motif |
| IR + p53wt | 97 | 124.5 | P53 wild type |

The concentration of each peptide was about 40 μM and the concentration of IR was 450 nM.
The 20D1, 20A4, and D8 peptide sequences are shown in FIGS. 8 and 9A-9B.
The remaining peptide sequences are as follows: 447 = LCQRLGVGWPGWLSGWCA (SEQ ID NO: 2156); 2A9 = LCQSWGVRIGWLTGLCP (SEQ ID NO: 2157); 20C11 = DRAFYNGLRDLVGAVYGAWD (SEQ ID NO: 1659); H2 = VTFTSAVFHENFYDWFVRQVS (SEQ ID NO: 1784).

[0376] Regarding preparation of a Site 1 agonist comprising two D117 (H2C) peptides, a linker of only 3 amino acids (12 Å) provided a ligand of greater affinity for Site 1 of IR than a corresponding ligand prepared with a 9 amino acid (36 Å) linking region (FIG. 29).

[0377] Stimulation of Autophosphorylation of IR by MBP-Fusion Peptides

[0378] MBP fusion peptides were prepared as described above, and then assayed for autophosphorylation of a insulin receptor construct transfected into 32D cells (Wang et al., 1993; clone 969) (see Example, above). The results of these experiments shown in FIG. 30 indicate that the H2C monomer and H2C-H2C homodimer peptides stimulate autophosphorylation of IR in vivo. H2C dimer peptides (Site 1-Site 1) with a 6 amino acid linker (H2C-6aa-H2C) were most active in the autophosphorylation assay. Other active dimer peptides are also shown in FIG. 30, particularly H2C-9aa-H2C, H2C-12aa-H2C, H2C-3aa-H2C, and F8.

[0379] Insulin Receptor Binding Affinity and Fat Cell Potency of MBP-Fusion Peptides

[0380] Results of assays to determine binding affinity for insulin receptor and fat cell potency of the MBP-fusion peptides are shown in Table 14, below.

TABLE 14

| | SEQ | | | | | |
|---|---|---|---|---|---|---|
| | ID | | Site | | HIR Kd | |
| Peptide | NO: | Formula | IR | Sequence | (mol/l) | FFC |
| RB426 | 2158 | F6 | 2 | MBP . . . NNNNLGIEGRISEFIEGRAQPAMAWLDQEWAWVQCEVYGRGCPSAAA | 1.4 * 10−8 | |
| | | | | (ETAG)AA | | |
| RB429 | 2159 | F6-F6 | 2-2 | MBP . . . NNNNLGIEGRISEFIEGRAQPAMAWLDQEWAWVQCEVYGRGCPSGGSGG | 1.3 * 10−8 | |
| | | | | SKWLDQEWAWVQCEVYGRGCPSAAA(ETAG)AA | | |
| RB505M | 2160 | F4 | 2 | MBP . . . NNNNLGIEGRISEFIEGRDYKDDDDK HLCVLEELFWGASLFGYCSGAA | | |
| | | | | A(ETAG)AA | | |
| RB517M | 2161 | F4-F4 | 2-2 | MBP . . . NNNNLGIEGRISEFIEGRDYKDDDDK HLCVLEELFWGASLFGYCSGGG | | |
| | | | | SGGSHLCVLEELFWGASLFGYCSGAAA(ETAG)AA | | |
| RB515 | 2162 | F4-F4 | 2-2 | MBP . . . NNNNLGIEGRISEFIEGRDYKDDDDK HLCVLEELFWGASLFGYCSGGG | | |
| | | | | SGGSGGSGGSH LCVLEELFWGASLFGYCSGAAA(ETAG)AA | | |
| RB510 | 2163 | F4-F4-F4 | 2-2-2 | MBP . . . NNNNLGIEGRISEFIEGRDYKDDDDK HLCVLEELFWGASLFGYCSGGG | | |
| | | | | SGGSHLCVLEELFWGASLFGYCSGGGSGGS HLCVLEELFWGASLFGYCSGAAA | | |
| | | | | (ETAG)AA | | |
| RB437 | 2164 | F1 | 1 | MBP . . . NNNNLGIEGRISEFIEGRAQPAMA FHENFYDWFVRQVSAAA(ETAG) | 8.3 * 10−8 | |
| | | | | AA | | |
| RB463 | 2165 | F1-F1 | 1-1 | MBP . . . NNNNLGIEGRISEFIEGRAQPAMAFHENFYDWFVRQVSGGSFHENFYDW | 9.6 * 10−7 | |
| | | | | FVRQVSAAA(ETAG)AA | | |
| RB439 | 2166 | F1-F1 | 1-1 | MBP . . . NNNNLGIEGRISEFIEGRAQPAMA FHENFYDWFVRQVSGGSGGSFHEN | 5.5 * 10−7 | |
| | | | | FYDWFVRQVS-ETAG | | |
| RB436 | 2167 | F1-F1 | 1-1 | MBP . . . NNNNLGIEGRISEFIEGRAQPAMAFHENFYDWFVRQVSGGSGGSGGSFH | 4.1 * 10−7 | |
| | | | | ENFYDWFVRQVSAAA(ETAG)AA | | |
| RB449 | 2168 | F1-F1 | 1-1 | MBP . . . NNNNLGIEGRISEFIEGR AQPAMAFHENFYDWFVRQVSGGSGGSGGSG | 6.2 * 10−7 | |
| | | | | GSAQPAMAFHENFYDWFVRQVSAAA(ETAG)AA | | |
| RB435 | 2169 | F1-F1-F1 | 1-1-1 | MBP . . . NNNNLGIEGRISEFIEGRAQPAMAFHENFYDWFVRQVSGGSFHENFYDW | 2.0 * 10−8 | |
| | | | | FVRQVSGGSFHENFYDWFVRQVSAAA(ETAG)AA | | |
| RB502 | 2170 | F1 | 1 | MBP . . . NNNNLGIEGRISEFIEGRDYKDDDDKVRVDWLQRNANFYDWFVAELVAA | | |
| | | | | A(ETAG)AA | | |
| RB508M | 2171 | F1-F1 | 1-1 | MBP . . . NNNNLGIEGRISEFIEGRDYKDDDDKVRVDWLQRNANFYDWFVAELGGG | | |
| | | | | SGGSGRVDWLQRNANFYDWFVAELGAAA(ETAG)AA | | |
| RB509M | 2172 | F1-F1 | 1-1 | MBP . . . NNNNLGIEGRISEFIEGRDYKDDDDKVRVDWLQRNANFYAWFVAELGGG | | |
| | | | | SGGSGGSGGSGRVDWLQRNANFYDWFVAELGAAA(ETAG)AA | | |
| RB452 | 2173 | F1 | 1 | MBP . . . NNNNLGIEGRISEFIEGRAQPAMARGGGTFYEWFESALRKHGAGAAA | 7.8 * 10−7 | |
| | | | | (ETAG)AA | | |
| RB427 | 2174 | F1-F1 | 1-1 | MBP . . . NNNNLGIEGRISEFIEGRAQPAMARGGGTFYEWFESTLRKHGAGGGSGG | 3.3 * 10−8 | |
| | | | | SRGGGTFYEWFESALRKHGAGAAA(ETAG)AA | | |
| RB434 | 2175 | F1-F1 | 1-1 | MBP . . . NNNNLGIEGRISEFIEVRAQPAMARGGGTFYEWFESALRKHGAGGGSGG | 3.2 * 10−8 | |
| | | | | SGGSGGSRGGGTFYEWFESALRKHGAGAAA(ETAG)AA | | |
| RB513 | 2176 | F1 | 1 | MBP . . . NNNNLGIEGRISEFIEGRDYKDDDDKGSLDESFYDWFERQLGKKAA | | |
| | | | | (ETAG)AA | | |
| RB516 | 2177 | F1-F1 | 1-1 | MBP . . . NNNNLGIEGRISEFIEGRDYKDDDDKGSLDESFYDWFERQLGKKGGSGG | | |
| | | | | SGSLDESFYDWFERQLGKKAAA(ETAG)AA | | |
| RB512 | 2178 | F1-F1 | 1-1 | MBP . . . NNNNLGIEGRISEFIEGRDYKDDDDKGSLDESFYDWFERQLGKKGGSGG | | |
| | | | | SGGSGGSGSLDESFYDWFERQLGKKAAA(ETAG)AA | | |
| RB464 | 2179 | F1 | 1 | MBP . . . NNNNLGIEGRISEFIEGRDYKDDDDK FHENFYDWFVRQVSAA(ETAG) | 3.8 * 10−18 | |
| | | | | AA | | |
| RB446 | 2180 | F4 | 2 | MBP . . . NNNNLGIEGRISEFIEGRDYKDDDDKHLCVLEELFWGASLFGYCSGAAA | 7.7 * 10−7 | |
| | | | | (ETAG)AA | | |
| RB459 | 2181 | F3 | 1 | MBP . . . NNNNLGIEGRISEFGSADYKDLDALDRLMRYFEERPSLAAA(ETAG) | 7.7 * 10−8 | |
| | | | | AA | | |
| RB430 | 2182 | F1-F3 | 1-1 | MBP . . . NNNNLGIEGRISEFIEGRDYKDDDDKFHENFYDWFVRQVSGGSGGS LD | 2.1 * 10−8 | |
| | | | | ALDRLMRYFEERPSLETAG | | |
| RB430 | 2183 | F1-F3 | 1-1 | cleaved DYKDDDKFHENFYDWFVRQVSGSGSLDALDRLMRYFEERPSLAAA(ETAG) | ˜4 * 10−9 | |
| | | | | AA | | |
| RB431 | 2184 | F1-F4 | 1-2 | MBP . . . NNNNLGIEGRISEFIEGRDYKDDDKFHENFYDWFVRQVSGGSGGSH LC | 4.7 * 10−8 | |
| | | | | VLEELFWGASLFGYCSGAAA(ETAG)AA | | |
| RB431 | 2185 | F1-F4 | 1-2 | cleaved DYKDDDKFHENFYDWFVRQVSGGSGGSHLCVLEELFWGASLFGYCSGAAA | ˜8 * 10−9 | |
| | | | | (ETAG)AA | | |
| RB432 | 2186 | F1-F4 | 1-2 | MBP-NNNNLGIEGRISEFIEGRDYKDDDKFHENFYDWFVRQVSGGSGGSGGSGGSH LC | 3.5 * 10−8 | |
| | | | | VLEELFWGASLFGYCSGAAA(ETAG)AA | | |
| RB432 | 2187 | F1-F4 | 1-2 | cleaved DYKDDDKFHENFYDWFVRQVSGGSGGSGGSGGSHLCVLEELFWGASLFGYC | ˜6 * 10−9 | |
| | | | | SGAAA(ETAG)AA | | |
| RB433 | 2188 | F1-F4 | 1-2 | MBP . . . NNNNLGIEGRISEFIEGRDYKDDDK FHENFYDWFVRQVSGGSGGSGGS | 2.1 * 10−8 | |
| | | | | H LCVLEELFWGASLFGYCSGAAA(ETAG)AA | | |
| RB508 | 2189 | F1-F1 | 1-1 | DYKDDDDKVRVDWLQRNANFYDWFVAELGGGSGGSGRVDWLQRNANFYDWFVAELGAAA | 1.5 * 10−7 | ++ |
| | | | | GAPVPYPDPLEPRSA | | |
| RB509 | 2190 | F1-F1 | 1-1 | DYKDDDDKVRVDWLQRNANFYAWFVAELGGGSGGSGGSGGSGRVDWLQRNANFYDWF | 5.5 * 10−8 | ++ |
| | | | | VAELGAAAGAPVPYPDPLEPRAA | | |
| RB505 | 2191 | F4 | 2 | DYKDDDDKHLCVLEELFWGASLFGYCSGAAA(ETAG)AA | 4.8 * 10−7 | − |
| RB517 | 2192 | F4-F4 | 2-2 | DYKDDDDKHLCVLEELFWGASLFGYCSGGGSGGSHLCVLEELFWGASLFGYCSGAAA | 6.0 * 10−8 | − |
| | | | | (ETAG)AA | | |
| RB521 | 2193 | F1-F1 | 1-1 | MADYKDDDDKGSLDESFYDWFERQLGKKGGSGGSGSLDESFYDWFERQLGKKAAA | 4.4 * 10−8 | +++++ |
| | | | | (ETAG)PG | | |
| RB535 | 2194 | F1-F1 | 1-1 | MADYKDDDDKGSLDESFYDWFERQLGKKGGSGGSGGSGGSGSLDESFYDWFERQLGKKA | ˜1.0 * 10−7 | +++++ |
| | | | | AA(ETAG)PG | | |
| RB540 | 2195 | F6 | 2 | MADYKDDDDKWLDQEWAWVQCEVYGRGCPSAAA(ETAG)PG | ˜1.0 * 10−7 | |
| RB539 | 2196 | F6-F1 | 2-1 | MADYKDDDDKWLDQEWAWVQCEVYGRGCPSGGSGGSGSLDESFYDWFERQLGKKAAA | 7 * 10−10 | ++++ |
| | | | | (ETAG)PG | | |
| RB537 | 2197 | F1-F6 | 1-2 | MADYKDDDDKGSLDESFYDWFERQLGKKGGSGGSWLDQEWAWVQCEVYGRGCPSAAA | 5.9 * 10−11 | − |
| | | | | (ETAG)PG | | |
| RB538 | 2198 | F1-F6 | 1-2 | MADYKDDDDKGSLDESFYDWFERQLGKKGGSGGSGGSGGSWLDQEWAWVQCEVYGRGCP | 1.7 * 10−11 | − |
| | | | | SAAA(ETAG)PG | | |
| RB626 | 2199 | F6-F1 | 2-1 | MADYKDEIEAEWGRVRCLVYGRCVGGGGSGGSGGSGGSGSLDESFYDWFERQLGKKAAA | 3.0 * 10−10 | +++ |
| | | | | (ETAG)PG | | |
| RB625 | 2200 | F6-F1 | 2-1 | MADYKDDDDKWLDQEWAWVQCEVYGRGCPSQPPPPDITTHRADPQGSLDESFYDWFERQ | 3.8 * 10−10 | +++++ |
| | | | | LGKKAAA(ETAG)PG | | |
| RB622 | 2201 | F6-F1 | 2-1 | MADYKDDDDKWLDQEWAWVQCEVYGRGCPSTPKPPTPPPLSADGSLDESFYDWFERQLG | 1.0 * 10−9 | ++++ |
| | | | | KKAAA(ETAG)PG | | |
| RB596 | 2202 | F1 | 1 | MQNDDGSLDESFYDWFERQLGHHHHHHPG | 9.4 * 10−8 | |
| RB569 | 2203 | F1 | 1 | MGSLDESFYDWFERQLGEEEGGDHHHHHHPG | 2.1 * 10−7 | |
| RB570 | 2204 | F1 | 1 | MQNDDGSLDESFYDWFERQLGEEEGGDHHHHHHPG | 2.5 * 10−8 | |

ETAG = GAPVPYPDPLEPR(SEQ ID NO: 2205); MBP . . . NNNNL = fusion junction to MBP at c-terminus of MBP; All dimers are linked C-N.

### Example 9

### In Vivo Assays for Insulin Agonists

[0381] To test the in vivo activity of dimer peptide S519, an intravenous blood glucose test was carried out on Wistar rats. Male Mol:Wistar rats, weighing about 300 g, were divided into two groups. A 10 μl sample of blood was taken from the tail vein for determination of blood glucose concentration. The rats were anaesthetized with Hypnorm/Dormicum at t=−30 min and blood glucose was measured again at t=−20 min and at t=0 min. After the t=0 sample was taken, the rats were injected into the tail vein with vehicle or test substance in an isotonic aqueous buffer at a concentration corresponding to a 1 ml/kg volume of injection. Blood glucose was measured at times 10, 20, 30, 40, 60, 80, 120, and 180 min. The Hypnorm/Dormicum administration was repeated at 20 minute intervals. Results shown in FIG. 33 demonstrate that the S519 (at 20 nmol/kg) peptide lowered blood glucose levels similar to levels observed for human insulin (at 2.5 nmol/kg) (n=8). The S519 peptide and human insulin showed comparable in vivo effects, both in magnitude and onset of response (FIG. 33).

### Example 10

### IGF-1 Surrogates

[0382] Three major groups of peptide IGF-1 surrogates were obtained from IGF-1R panning experiments: Site 1 A6 (FyxWF) (SEQ ID NO: 1596); Site 1 B6 (FyxxLxxL) (SEQ ID NO: 1732), and Site 2 (C—C looped). See Beasley et al. International Application PCT/US00/08528, filed Mar. 29, 2000, and Beasley et al., U.S. application Ser. No. 09/538,038, filed Mar. 29, 2000. Active surrogates included 20E2 and RP6 (B6-like; Formula 2), S175 (A6-like; Formula 1), G33 (A6-like; Formula 1), RP9 (A6-like; Formula 1), D815 (Site 2), and D8B12 (Site 2) peptides. The IGF-1 surrogates were analyzed by various assays, described as follows.

[0383] D. Phage Competition

[0384] Phage competition studies were performed with Site 1 (RP9) and Site 2 (D815) monomer peptides. Plates were coated with IGF-1R (100 ng/well in carbonate buffer, pH 9.6) overnight at 4° C. Wells were blocked with 4% non-fat milk in PBS for 60 min at room temperature. One hundred microliters of rescued phage were added to each well. Peptides in varying concentrations were added and the mixtures were incubated for 2 hr at room temperature. Plates were washed three times with PBS and 100 μl of anti-M13 antibody conjugated to horseradish peroxidase was added to each well. The labeled antibody was incubated at room temperature for 60 min. After washing, 100 μl of ABTS was added per well and the plates read in a microtiter reader at 450 nM.

[0385] Phage included RP9 (A6-like; Formula 1); RP6 (B6-like; Formula 2); D8B12 (Site 2); and D815 (Site 2). Peptides included RP9 and D815.

| | | Site | | SEQ |
|---|---|---|---|---|
| | | IGF- | | ID |
| Peptide | Formula | 1R | Sequence | NO: |
| D8B12 | 6 | 2 | WLEQERAWIWCEIQGSGCRA | 1884 |
| D815 | 6 | 2 | WLDQERAWLWCEISGRGCLS | 2206 |
| RP6 | 2 | 1 | TFYSCLASLLTGTPQPNRGP | 1635 |
| | | | WERCR | |
| RP9 | 1 | 1 | GSLDESFYDWFERQLG | 1559 |

[0386] Results shown in FIGS. 34A-34E demonstrate that that RP9 and D815 peptides competed both Site 1 and Site 2 phage. These results illustrate the allosteric nature of the interaction with IGF-1R.

[0387] Phage competition studies were also performed with Site 2-Site 1 dimer peptides containing 6- or 12-amino acid linkers. Plates were coated with IGF-1R (100 ng/well in carbonate buffer, pH 9.6) overnight at 4° C. Wells were blocked with 4% non-fat milk in PBS for 60 min at room temperature. One hundred microliters of rescued phage were added to each well. Peptides in varying concentrations were added and the mixture incubated for 2 hr at room temperature. Plates were washed three times with PBS and 100 μl of anti-M13 antibody conjugated to horseradish peroxidase was added to each well. The labeled antibody was incubated for 60 min at room temperature. After washing, 100 μl of ABTS was added per well and the plates read in a microtiter reader at 450 nM. Phage included RP9, RP6, D8B12, and D815. Peptides included D815-6L-RP9 and D815-12L-RP9. Linker sequences are underlined and shown below.

| | | Site | | SEQ |
|---|---|---|---|---|
| | | IGF- | | ID |
| Peptide | Formula | 1R | Sequence | NO: |
| D815- | 6-1 | 2-1 | LDQERAWLWCEISGRGCLSGGSGG | 2207 |
| 6L- | | | SGSLDESFYDWFERQLGKK | |
| RP9 | | | | |
| D815- | 6-1 | 2-1 | WLDQERAWLWCEISGRGCLSGGSG | 2208 |
| 12L- | | | GSGGSGGSGSLDESFYDWFERQLG | |
| RP9 | | | KK | |

[0388] D8B12, D815, RP6, and RP9 amino acid sequences are shown in the previous section. Results shown in FIGS. 35A-35E demonstrate that dimers competed both Site 1 and Site 2 phage. This indicates that both dimer units were active at IGF-1R.

[0389] IGF-1 Proliferation Assays

[0390] FDCP-2 cells expressing the IL-3 and human IGF-1R receptors were grown in RPMIk-1640 medium supplemented with 15% fetal bovine serum (FBS) and 5% WEHI conditioned medium (containing IL-3) in accordance with routine methods. Prior to an experiment, the cells were pelleted and washed two times in PBS. Following this, cells were resuspended in RPMI-1640 medium with 2% FBS and added to a 96-well plate at a concentration of 2×10⁴ cells/well in 75 μl. This was designated as the cell plate.

[0391] Peptides were suspended in PPMI-15% FBS (test medium). For the agonist assay, medium was added to rows 2-12 of a 96 well plate. The peptide was added to row 1 in 200 μl of test medium at a final concentration of 60 μM. The peptide was serially diluted (1:1) across rows 2-11. No peptide was added to row 12 (control; cells without IGF-1). For the antagonist assay, test medium containing 10 ng/ml IGF-1 (ED₅₀ test medium) was added to all wells of a 96 well plate. To row 1 was added 100 μl of peptide in ED₅₀ test medium at a concentration of 120 μM. The peptide was serially:diluted (1:1) across rows 2-11. No peptide was added to row 12 (control; cells with IGF-1).

[0392] For both agonist and antagonist assays, 75 μl from the working plates was transferred to the appropriate rows in comparable cell plates. The starting peptide concentration for both agonist and antagonist assays was 30 μM. Each peptide was done in duplicate. Plates were incubated at 37° C. for 45-48 hr. Ten microliters of WST-1 (Cell Proliferation Reagent, Roche cat #1 644 807) were added to each well and the plates were read in an ELISA reader (440/700 dual wavelength) each hour for 4 hr. Graphs were prepared from the raw data using Sigma Plot. Peptides included:

| | | Site | | SEQ |
|---|---|---|---|---|
| | | IGF- | | ID |
| Peptide | Formula | 1R | Sequence | NO: |
| 20E2 | 2 | 1 | DYKDFYDAIDQLVRGSARAGGTRD | 2209 |
| D815 | 6 | 2 | WLDQERAWLWCEISGRGCLS | 2206 |
| G33 | 1 | 1 | GIISQSCPESFYDWFAGQVSDPWW | 1600 |
| | | | CW | |
| RP6 | 2 | 1 | TFYSCLASLLTGTPQPNRGPWERC | 1635 |
| RP9 | 1 | 1 | RGSLDESFYDWFERQLG | 1559 |
| S175 | 1 | 1 | GRVDWLQRNANFYDWFVAELG | 1560 |

[0393] Results of the IGF-1 proliferation assays are shown in FIGS. 36-42. FIG. 36 demonstrates that that peptides G33 (Site 1; ED₅₀˜10 μM) and D815 (Site 2; ED₅₀˜2 μM) showed agonist activity at IGF-1R, whereas peptides RP9 and RP6 showed no agonist activity. FIG. 37 demonstrates that that peptides RP6 (Site 1; ED₅₀˜1 μM) and RP9 (Site 1; ED₅₀˜7 μM) showed antagonist activity at IGF-1R, whereas peptides G33 and D815 showed no antagonist activity. FIG. 38 demonstrates that peptides S175 and 20E2 exhibited weak agonist activity at IGF-1R (ED₅₀>10 μM). FIG. 39 shows that D815-RP9 dimers with 6- or 12-amino acid linkers acted as agonists at IGF-1R. FIG. 40 shows that dimer peptide D815-6-G33 was inactive as an agonist at IGF-1R. FIG. 41 shows that monomer peptide RP6 acted as an antagonist at IGF-1R. The IGF-1 standard curve determined for FDCP-2 cells is shown in FIG. 42.

[0394] The IGF-1R data for the Site 1 and Site 2 peptides is summarized in Table 15, below.

TABLE 15

| | | | | | | | | | | | |
|---|---|---|---|---|---|---|---|---|---|---|---|
| | | | | | | nM | | | | | |
| | | Site | | | SEQ | Ki | nM | | nM | | |
| Mon./ | | IGF- | | | ID | app | ED₅₀ | Max | IC₅₀ | Ki/ | |
| Dimer | Form. | 1R | Link. | Sequence | NO: | Kd | Growth | Action | Antag. | ED50 | Class |

| | | | | | | | | | | | |
|---|---|---|---|---|---|---|---|---|---|---|---|
| IGF-1 | | | NA | | | 0.69 | 0.30 | 100 | 2 | 2.3 | A |
| rG33 | 1 | 1 | NA | GIISQSCPESFYDWFAGQVSDPWWCW | 1600 | 1450 | 500 | >50 | — | 2.9 | A |
| rD815 | 6 | 2 | NA | WLDQERAWLWCEISGRGCLS | 2206 4080 | 500 | >50% | — | 8.2 | A | |
| RP9 | 1 | 1 | NA | GSLDESFYDWFERQLG | 1559 | 417 | — | <10% | 900 | 0.5 | N |
| D815- | 6-1 | 2-1 | 6 | WLDQERAWLWCEISGRGCLSGGSG | 2210 | 624 | — | <10% | nd | | nd |
| G33 | | | aa | GSGIISQSCPESFYDWFAGQVSDPW | | | | | | | |
| | | | | WCW | | | | | | | |
| D815- | 6-1 | 2-1 | 6 | WLDQERAWLWCEISGRGCLSGGSG | 2211 | 36 | 50 | >50% | >500 | 0.8 | A |
| RP9 | | | aa | GSGSLDESFYDWFERQLGKK | | | | | | | |
| D815- | 6-1 | 2-1 | 12 | WLDQERAWLWCEISGRGCLSGGSG | 2212 | 3 | 10,000 | 100 | — | 0.0003 | A |
| RP9 | | | aa | GSGGSGGSGSLDESFYDWFERQLG | | | | | | | |
| | | | | KK | | | | | | | |

A = agonists; N = antagonist; nd = not determined; NA = not applicable; Form.= formula; Mon. = monomer; Antag. = antagonism; Link. = linker; Linker sequences are underlined.

### Example 11

### Panning Peptide Libraries

[0395] E. Panning IGF-1 Surrogate Secondary Libraries

[0396] Soluble IGF-1R (“sIGF-1R”) was obtained from R&D Systems. The soluble protein (>95% pure) included the heterotetrameric (alpha 2-beta 2) extracellular domain of IGF-1R isolated from a mouse myeloma cell line. sIGF-1R (500 ng/well) was added to an appropriate number of wells in a 96-well microtiter plate (MaxiSorp plates, NUNC) and incubated overnight at 4° C. Wells were then blocked with MPBS (PBS buffer pH 7.5 containing 2% Carnation® non-fat dry milk) at room temperature (RT) for 1 h. Eight wells were used for each round of panning for the G33 and RP6 secondary libraries. The phage were incubated with MPBS for 30 min at RT, then 100 μl was added to each well.

[0397] For the first round, the input phage titer was 4×10¹³ cfu/ml. For rounds 2 and 3, the input phage titer was approximately 10¹¹ cfu/ml. Phage were allowed to bind for 2 to 3 h at RT. The wells were then quickly washed 13 times with 200 μl/well of MPBS. Bound phage were eluted by incubation with 100 μl/well of 20 mM glycine-HCl, pH 2.2 for 30 s. The resulting solution was then neutralized with Tris-HCl, pH 8.0. Log phase TG1 cells were infected with the eluted phage, then plated onto two 24 cm×24 cm plates containing 2xYT-AG. The plates were incubated at 30° C. overnight. The next morning, cells were removed by scraping and stored in 10% glycerol at −80° C. For subsequent rounds of affinity enrichment, cells from these frozen stocks were grown and phage were prepared as described above. A minimum of 72 clones was picked at random from the second, third, and fourth rounds of panning and screened for binding activity. DNA sequencing of the clones determined the amino acid sequences summarized in FIG. 43A-43B.

[0398] Panning Peptide Dimer Libraries

[0399] Microtiter plates were coated and blocked by standard methods, as follows. Plates were coated with sIGF-1R (see Example, above) or soluble IR (Bass construct; Bass et al., 1996, J. Biol. Chem. 271:19367-19375) in 0.2 M NaHCO₃, pH 9.4. One hundred microliters of solution containing either 50 ng IR or IGF-1R (rounds 1 and 2), 25 ng IR or IGF-1R (round 3), or 12.5 ng IR or IGF-1R (round 4) was added to an appropriate number of wells in a 96-well microtiter plate (MaxiSorp plates, Nalge NUNC) and incubated overnight at 4° C. Wells were then blocked with a solution of 2% non-fat milk in PBS (MPBS) at RT for at least 1 h.

[0400] Eight wells coated with IR or IGF-1R were used for each round of panning. One hundred microliters of phage were added to each well. For the first round, the input phage titer was 3×10¹³ cfu/ml. For subsequent rounds, the input phage titer was approximately 10¹² cfu/ml. Phage were incubated for 2-3 h at RT. The wells were then quickly washed 13 times with 300 μl/well of PBS. Bound phage were eluted by incubation with 150 μl/well of 50 mM glycine-HCl, pH 2.0 for 15 min. The resulting solution was pooled and then neutralized with Tris-HCl, pH 8.0. Log phase TG1 cells were infected with the eluted phage, in 2xYT medium for 1 hr at 37° C. prior to the addition of helper phage, ampicillin, and glucose (2% final concentration).

[0401] After incubation for 1 hr at 37° C., the cells were spun down and resuspended in 2xYT-AK medium. The cells were then returned to the shaker and incubated overnight at 37° C. Phage amplified overnight were then precipitated and subjected to the next round of panning. A total of 96 clones were picked at random from rounds 3 and 4 and screened for binding activity. Several clones from each pan were further tested for binding to IR or IGF-1R in phage ELISA by competition with soluble peptides as described in Beasley et al. International Application PCT/US00/08528, filed Mar. 29, 2000, and Beasley et al., U.S. application Ser. No. 09/538,038, filed Mar. 29, 2000. Competition was performed by addition of 5 μl of RP9 peptide, recombinant D8 peptide, or both per well, followed by addition of 100 μl of phage per well. Representative peptides are shown in FIGS. 44A-44B and in Table 16, below.

TABLE 16

| | SEQ | | | | |
|---|---|---|---|---|---|
| | ID | | Site | | |
| Pep. | NO: | Form. | IR | Sequence | Description |
| RP27 | 2213 | 6-1 | 2-1 | GLDQEQAWVECEVYGRGCPYGSLDESFYDW | No linker |
| | | | | FERQLG | |
| RP28 | 2214 | 6-1 | 2-1 | RLEEEWAWVQCEVYGRGCPSGGSGGSGSLD | EEE Stretch in D8 |
| | | | | ESFYDWFERQLG | |
| RP29 | 2215 | 6-1 | 2-1 | SLDREWACVKCEVYGRGCPCGGSGGSGSLD | Repeat isolate |
| | | | | ESFYDWFERQLG | |
| RP30 | 2216 | 6-1 | 2-1 | SLEEEWAQVECEVYGRGCPSGGSGGSGSLD | D8 by Design |
| | | | | ESFYDWFERQLG | |
| RP31 | 2217 | 6-1 | 2-1 | SLEEEWAQVECEVYGRGCPSGGSGGSGLLD | D8 & RP9 by design |
| | | | | ESFYHWFDRQLR | |
| RP32 | 2218 | 6-1 | 2-1 | SIEEEWAQIKCDVWGRGCPPGGSGGSGLLD | D8 & RP9 by design |
| | | | | ESFYHWFDRQLR | |
| RP33 | 2219 | 6-1 | 2-1 | QLDLEWAWVQCEVYGRGCGGSGSLDESFYD | 3 amino acid linker |
| | | | | WFERQLG | |
| RP34 | 2220 | 6-1 | 2-1 | QLDEEWAGVQCEVYGRGCSLDESFYDWFER | No linker |
| | | | | QLG | |
| RP35 | 2221 | 6-1 | 2-1 | RLEEEWRWVQCEVYGRGCAAGGSGGSGSLD | EEE Stretch in D8 |
| | | | | ESFYDWFERQLG | |
| RP36 | 2222 | 6-10 | 2-1 | SLDQEWAWVQCEVYGRGCPSGGSGGSDSDW | D8 (W1->S)- Group 6 |
| | | | | AGYEWFEEQLD | by design |

Pep. = peptide; Form. = formula; Linker sequences are shown in bold and underlined; All dimers are linked C-N

[0402] Determination of Amino Acid Preferences

[0403] For both monomer and dimer peptides, amino acid preferences for each peptide were determined as follows. The expected frequency of each of the 20 amino acids at that position was calculated based on codon usage and % doping for that library. This was then compared to the actual frequency of occurrence of each amino acid at every position after four rounds of biopanning. Any amino acid that occurred at a frequency >2-fold was considered preferred. Most preferred amino acid(s) were those that have the greatest fold enrichment after panning. Preferred amino acid sequences for RP9, D8, and Formula 10 (Group 6) peptides are shown below.

TABLE 17

| | | SEQ |
|---|---|---|
| | | ID |
| Peptide | Sequence | NO: |
| RP9 | GSLDESFYDWFERQLG | 1559 |
| Regular | GLADEDFYEWFERQLR | 2223 |
| | L | |
| w/Peptide | GQLDEDFYEWFDRQLS | 2224 |
| | A | |
| w/Insulin | GFMDESFYEWFERQLR | 2225 |
| | W A | |

[0404] Table 17 shows preferred amino acid sequences for RP9 peptides. Residues in bold indicate strong preference; underlined residues indicate positions where more than one amino acid preference is seen. The first column indicates the conditions used for the panning procedure. “RP9” indicates sequence of the parent RP9; “Regular” indicates regular pan as described in methods for panning of random libraries; “w/peptide” indicates panning in the presence of 2 nM RP9 peptide; “w/insulin” indicates panning in the presence of 2 nM insulin.

TABLE 18

| | | SEQ |
|---|---|---|
| | | ID |
| Peptide | Sequence | NO: |
| D8 Parent: | WLDQEWAWVQCEVYGRGCPS | 2129 |
| Dimer Consensus | sLEEEWaQIECEVY/WGRGCps | 2226 |
| Monomer Consensus | sLEEEWaQIqCEIY/WGRGCry | 1548 |
| | W | |

[0405] Table 18 shows preferred amino acid sequences for D8 peptides. Upper case residues in bold indicate strong preference (>90% frequency); upper case letters, non-bold, indicate some preference (5-15% higher frequency than expected); lower case letters indicate less preference (2-5% higher frequency than expected); similar preferences seen in D8 in both monomer and dimer libraries. The underlined Y/W indicates that both residues are equally preferred at that position. In the original D8 sequence that position is occupied by Y.

TABLE 19

| | | | SEQ |
|---|---|---|---|
| | | | ID |
| Peptide | Sequence | Type | NO: |
| Group 6 | W(A/E)GYEW(F/L) | preferred core | 1549 |
| Group 6 | DSDWAGYEWFEEQLD | preferred sequence | 1595 |

[0406] Table 19 shows preferred amino acid sequences for Group 6 peptides. Underlined residues indicate preferred N-terminal and C-terminal extensions.

### Example 12

### Fluorescence-Based HIGF-1R Binding Assays

[0407] F. Heterogeneous Time-Resolved Fluorometric Assays

[0408] The effect of recombinant peptide surrogate G33 (rG33) on the binding of biotinylated-recombinant human IGF-1 (b-rhIGF-1) to recombinant human IGF-1R (rhIGF-1R) was determined using heterogeneous time-resolved fluorometric assays (TRF; DELFIA®, PE Wallac, Inc.). The rhIGF-1R protein included the extracellular domain of the receptor pre-propeptide, up to amino acid residue 932 (A. Ullrich et al., 1986, EMBO J. 5:2503-2512). Duplicate data points were collected at each concentration of competitor and the lines were designed to represent the best fit to a four-parameter non-linear regression analysis (y=min+(max−min)/(1+10ˆ((logIC₅₀−x)*Hillslope))) of the data, which was used to determine IC₅₀ values.

[0409] The assay was performed using a 96-well clear microplate (NUNC MaxiSorp) with a final volume of 100 μl. Microtiter plates were coated with 0.1 μg rhIGF-1R in 100 μl of NaHCO₃, pH 8.5 buffer, and incubated overnight at room temperature (RT). The plates were washed 3-times with 0.05 M Tris-HCl (pH 8 at 25° C.), 0.138 M NaCl, 0.0027 M KCl (TBS). This was followed by addition of 200 μl blocking buffer (TBS containing 0.05% Bovine Serum Albumin (BSA, Cohn Fraction V)), and incubated for 1 hr at RT. The plates were washed 6-times with a 1× solution of Wallac's DELFIA wash concentrate. Competitor was added in a volume of 50 μl and serially diluted across the microtiter plate in TBS containing 0.05% BSA. Non-specific binding (background) was determined in the presence of 60 μM hIGF-1.

[0410] Fifty microliters of b-rhIGF-1, 10 nM, diluted in TBS containing 0.05% BSA was added. The plates were incubated for 2 hr at RT. After incubation, plates were washed 6-times with a 1× solution of Wallac's DELFIA wash concentrate. Then the plates were treated with 100 μL of Wallac's DELFIA Assay Buffer containing a 1:1000 dilution of europium-labeled streptavidin and incubated for 2 hours at RT. This was followed by washing 6-times with a 1× solution of Wallac's DELFIA wash concentrate. One hundred microliters of Wallac's DELFIA enhancer was added, and the plates were shaken for 30 min at RT. After shaking, the fluorescence signal at 620 nm was read on a Victor² 1420 plate reader (PE Wallac, Inc.). Primary data were background corrected, normalized to buffer controls, and then expressed as % Specific Binding. The Z′-factor was greater than 0.5 (Z′=1−(3τ₊+3τ₋)/|μ₊−μ₋|; Zhang et al., 1999, J. Biomol. Screen. 4:67-73) and the signal-to-background (S/B) ratio was ˜20. The results of these experiments are shown in FIG. 45. The IC₅₀ value calculated for rG33 is shown in Table 20, below.

[0411] The effect of recombinant peptide surrogates D815 (rD815), RP9, D815-6aa-G33, D815-6aa-RP9, and D815-12aa-RP9 on the binding of b-rhIGF-1 to rhIGF-1R was determined using the fluorometric assay described above. IGF-1 was used as a control. Duplicate data points were collected at each concentration of competitor and the lines represent the best fit to a four-parameter non-linear regression analysis, which was used to determine IC₅₀ values. Results for rD815 are show in FIG. 46; results for RP9 are shown in FIG. 47; results for D815-6-G33 are shown in FIG. 48; results for D815-6-RP9 are shown in FIG. 49; and results for D815-12-RP9 are shown in FIG. 50; the results for IGF-1 are shown in FIG. 51. The IC₅₀ values for the rD815, RP9, D815-6aa-G33, D815-6aa-RP9, and D815-12aa-RP9 peptides, and IGF-1 are shown in Table 20, below. Linker sequences are underlined.

TABLE 20

| | | SEQ | |
|---|---|---|---|
| | | ID | |
| Competitor | Sequence | NO: | IC₅₀ (M) |
| rG33 | GIISQSCPESFYDWFAGQV | 1600 | 1.45 × 10⁻⁶ M |
| | SDPWWCW | | |
| rD815 | WLDQERAWLWCEISGRGCL | 2206 | 4.08 × 10⁻⁶ M |
| RP9 | SGSLDESFYDWFERQLG | 1559 | 4.17 × 10⁻⁷ M |
| D815-6aa- | WLDQERAWLWCEISGRGCL | 2210 | 6.24 × 10⁻⁷ M |
| G33 | SGGSGGSGIISQSCPESFY | | |
| | DWFAGQVSDPWWCW | | |
| D815-6aa- | WLDQERAWLWCEISGRGCL | 2211 | 3.57 × 10⁻⁸ M |
| RP9 | SGGSGGSGSLDESFYDWFE | | |
| | RQLGKK | | |
| D815-12aa- | WLDQERAWLWCEISGRGCL | 2212 | 3.22 × 10⁻⁹ M |
| RP9 | SGGSGGSGGSGGSGSLDES | | |
| | FYDWFERQLGKK | | |
| IGF-1 | | | 6.85 × 10⁻¹⁰ M |

[0412] The order of potency of all peptides or dimers compared to IGF-1 was determined as: IGF-1>D815-12aa-RP9>>D815-6aa-RP9>RP9≅D815-6aa-G33>rG33>rD815. These results suggest that the coupling of D815 with RP9 using an extended linker (12 versus 6 amino acids) produced a potent competitor that approximates the affinity of IGF-1 for its own receptor.

[0413] G. Time-Resolved Fluorescence Resonance Energy Transfer Assays

[0414] The effect of Site 1 peptide surrogates, Site 2 peptide surrogates, and rhIGF-1 on the dissociation of biotinylated-20E2 (b-20E2, Site 1) from recombinant human IGF-1R was determined using time-resolved fluorescence resonance energy transfer assays (TR-FRET). Best fit non-linear regression analysis of the data, was used to determine dissociation rate constants. Each data point represents a single observation.

[0415] The assay was performed using a 96-well white microplate (NUNC) with a final volume of 100 μl. Final incubation conditions were 16.5 nM b-20E2, 2.2 nM SA-APC (streptavidin-allophycocyanin), 2.2 nM Eu³⁺-rhIGF-1R (LANCE™ labeled, PE Wallac, Inc.), 0.05 M Tris-HCl (pH 8 at 25° C.), 0.138 M NaCl, 0.0027 M KCl, and 0.1% BSA (Cohn Fraction V). Reactions were allowed to reach equilibrium for 6 hr at RT. Following this, various peptide surrogates or IGF-1 were added at a final concentration of 100 μM or 30 μM, respectively. The addition of peptides or IGF-1 initiated the measurement of dissociation (Time Zero, sec). The fluorescence signal at 665 nm was read on a Victor² 1420 plate reader (PE Wallac, Inc.) at 30 sec intervals.

[0416] Results of these experiments are shown in FIG. 52. The buffer controls did not vary over the time interval of study, which demonstrated that the equilibrium was not disturbed by the addition of diluent at Time zero. The addition of excess (>1000-fold 20E2 K_{d} for IGF-1R) Site 1 peptides such as H2C, 20E2, or RP6 did not differ depending on specific the peptide used, and the dissociation rates of b-20E2 were similar for these peptides. D8B12 (Site 2 peptide) and IGF-1 (binds both Site 1 and Site 2) did demonstrate significant differences in the rate of dissociation of b-20E2. This would suggest that these agents act as non-competitive or allosteric regulators of Site 1 binding.

[0417] The effect of various peptide surrogates or peptide dimers on the binding of biotinylated-20E2 (B-20E2) to recombinant human IGF-1R was determined using TR-FRET assays, described above. For these experiments, each data point represents the average of two replicate wells. The lines represent the best fit to a four-parameter non-linear regression analysis (y=min+(max−min)/(1+10ˆ((logIC₅₀−x)*Hillslope))) of the data, which was used to determine IC₅₀ values.

[0418] The assays were performed using a 384-well white microplate (NUNC) with a final volume of 30 μl. Final incubation conditions were 15 nM b-20E2, 2 nM SA-APC, 2 nM Eu³⁺-rhIGF-1R (LANCE™ labeled, PE Wallac, Inc.), 0.05 M Tris-HCl (pH 8 at 25° C.), 0.138 M NaCl, 0.0027 M KCl, and 0.1% BSA (Cohn Fraction V). After 16-24 hr of incubation at RT, the fluorescence signal at 665 nm and 620 nm was read on a Victor² 1420 plate reader (PE Wallac, Inc.). Primary data were background corrected, normalized to buffer controls, and then expressed as % Specific Binding. The Z′-factor was greater than 0.5 (Z′=1−(3σ₊+3σ₋)/|μ₊−μ₋|; Zhang et al, 1999, J. Biomol. Screen. 4:67-73) and the signal-to-background (S/B) ratio was ˜4. Results of these experiments are shown in FIG. 53. Table 21, below, shows the IC₅₀ values calculated for these experiments. Notably, the Cl peptide showed IGF-1R affinities of ˜1 nM (FIG. 53) and ˜10 nM (Table 21) in these assays.

TABLE 21

| | | SEQ | | Site | |
|---|---|---|---|---|---|
| | | ID | | IGF- | |
| Competitor | Sequence | NO: | Formula | 1R | IC₅₀ (M) |
| C1 | CWARPCGDAANFYDWFVQQ | 1550 | 1 | 1 | 8.80E−10 |
| | AS | | | | |
| IGF-1 | | | | | 2.93E−09 |
| RP9 | GSLDESFYDWFERQLG | 1559 | 1 | 1 | 3.93E−08 |
| 20E2 | DYKDFYDAIDQLVRGSARA | 2209 | 2 | 1 | 1.04E−07 |
| | GGTRD | | | | |
| E8 | GGTVWPGYEWLRNA | 2118 | 10 | 2 | 2.53E−07 |
| H2C | FHENFYDWFVQRVSKK | 2117 | 1 | 1 | 4.60E−07 |
| S173 | LDALDRLMRYFEERPSL | 1830 | 3 | 1 | 6.29E−06 |
| D8B12 | WLEQERAWIWCEIQGSGCRA | 1884 | 6 | 2 | 1.13E−05 |
| A6 | SAKNFYDWFVKK | 1551 | 1 | 1 | 3.10E−05 |

[0419] H. Fluorescence Polarization Assays

[0420] The effect of various peptide monomers and dimers on the binding of fluorescein-RP-9 (FITC-RP9) to soluble human insulin receptor-immunoglobulin heavy chain chimera (sIR-Fc; Bass et al., 1996, J. Biol. Chem. 271:19367-19375) was determined using fluorescence polarization assays (FP). For these experiments, each data point represents the average of two replicate wells. The lines represent the best fit to a four-parameter non-linear regression analysis of the data, which was used to determine IC₅₀ values.

[0421] The assays were performed in a 384-well black microplate (NUNC) with a final volume of 30 μl. Final incubation conditions were 1 nM FITC-RP9, 10 nM sIR, 0.05 M Tris-HCl (pH 8 at 25° C.), 0.138 M NaCl, 0.0027 M KCl, 0.05% BGG (bovine gamma globulin), 0.005% Tween-20. After 16-24 hr of incubation at RT, the fluorescence signal at 520 nm was read on an Analyst™ AD plate reader (LJL BioSystems, Inc.). Primary data were background corrected using 10 nM sIR without FITC-RP9 addition, normalized to buffer controls and then expressed as % Specific Binding. The Z′-factor was greater than 0.5 (Z′=1−(3σ₊+3σ₋)/|μ₊−μ_{-μ}₋|; Zhang et al, 1999, J. Biomol. Screen. 4:67-73) and the assay dynamic range was ˜125 mP. In parallel with these experiments, TR-FRET assays were performed using rhIGF-1R and b-20E2, as described above. Results of the FP and TR-FRET experiments are shown in Table 22, below.

TABLE 22

| | | | | | | | |
|---|---|---|---|---|---|---|---|
| | | | Binding | | | | |
| | FP | TR-FRET | Ratio | | | SEQ | |
| | sIR- | rhIGF | IGF- | | Site | ID | |
| Peptide | Fc | 1R | 1R/IR | Formula | IGF-1R | NO: | Sequence |

| | | | | | | | |
|---|---|---|---|---|---|---|---|
| RP4 | 17 | 8100 | 476 | 2 | 1 | 1552 | PPWGARFYDAIEQ |
| | | | | | | | LVFDNL |
| S175 | 10 | 1650 | 165 | 1 | 1 | 1560 | GRVDWLQRNANFY |
| | | | | | | | DWFVAELG |
| RP15 | 28 | 706 | 25 | 1 | 1 | 2130 | SQAGSAFYAWFDQ |
| | | | | | | | VLRTV |
| H2C | 66 | 600 | 9 | 1 | 1 | 2117 | FHENFYDWFVQRV |
| (D117) | | | | | | | SKK |
| 20E2 | 51 | 100 | 1.9 | 2 | 1 | 2209 | DYKDFYDAIDQLV |
| (D118) | | | | | | | RGSARAGGTRD |
| RP9 | 24 | 33 | 1.4 | 1 | 1 | 1559 | GSLDESFYDWFER |
| | | | | | | | QLG |
| G33 | 139 | 178 | 1.3 | 1 | 1 | 1600 | GIISQSQPESFYD |
| | | | | | | | WFAGQVSDPWWCW |
| E8 | 206 | 175 | 0.85 | 10 | 2 | 2118 | GGTVWPGYEWLRN |
| (D120) | | | | | | | A |
| C1 | 52 | 10 | 0.19 | 1 | 1 | 1550 | CWARPCGDAANFY |
| (D112) | | | | | | | DWFVQQAS |
| RP16 | 6400 | 961 | 0.15 | | | 1553 | VMDARDDPFYHKL |
| | | | | | | | SELVT |

FP sIR-Fc column shows IC₅₀ (nM) values obtained (vs. FITC-RP9); TR-FRET rhIGF-1R column shows IC₅₀ (nM) values obtained (vs. b-20E2); for Binding Ratio: higher values indicated higher affinity for IR than IGF-1R.

[0422] These results demonstrated that S175, RP4, and RP15 showed high affinities for IR and showed high binding ratios for IGF-1R over IR. H2C, 20E2, RP9, and Cl were slightly less potent than S175, RP4, and RP15 at IR, and these peptides had lower binding ratios for IGF-1R over IR. G33 and E8 were less potent than S175, RP4, and RP15 at IR, and showed comparable binding to IGF-1R and IR. RP16 had poor potency at IR and IGF-1R, but had higher affinity for IGF-1R than IR.

### Example 13

### Insulin Receptor Surrogates with Enhanced Specificity

[0423] Peptide S597 was tested for its bioactivity relative to insulin. SGBS cells (a human adipocyte cell line) were incubated with various concentrations of human insulin or peptide S597 and cellular uptake of ¹⁴C-glucose was measured essentially as described in Example 4. The results (as illustrated in FIG. 54) indicate that the potency of S597 in stimulating glucose uptake is at least as good as that of human insulin.

[0424] The glucose-lowering effect of peptide S597 and peptide S557 in rats was compared with that of insulin as follows: Eighteen male Wistar rats, 200-225 g, fasted for 18 h, were anesthetized using Hypnorm-Dormicum (1.25 mg/ml Dormicum, 2.5 mg/ml fluanisone, 0.079 mg/ml fentanyl citrate) 2 ml/kg as a priming dose 30 min prior to test substance dosing and additional 1 ml/kg every 20 minutes (at time points −10 min, 10 min and 30 min relative to test substance dosing).

[0425] The rats were allocated into three groups. The animals were dosed with an intravenous injection (tail vein), 2 ml/kg, of either human insulin 1.25 nmol/kg (n=6) or S557 peptide 5 nmol/kg (n=6) or S597 peptide 5 nmol/kg (n=6). Blood samples for the determination of whole blood glucose concentration were collected in heparinized 10 μl glass tubes by puncture of the capillary vessels in the tail tip at times −20 min and 0 min (before dosing), and at times 10, 20, 30, 40, 60, 80, 120, and 180 min after dosing. Blood glucose concentrations were measured after dilution in analysis buffer by the immobilized glucose oxidase method using an EBIO Plus autoanalyzer (Eppendorf, Germany).

[0426] The results (as illustrated in FIG. 55) indicate that the blood glucose lowering effect of S597 in rats is about 4 times lower than that of human insulin. The improved effect of S597 relative to S557 shows the effect of N-terminal acetylation.

[0427] The glucose-lowering effect of different concentrations of peptide S597 was also tested by intravenous administration to fasted Goettingen minipigs weighing about 15 kg. The results (as illustrated in FIG. 56) indicate that the glucose-lowering effect at 3 nmol/kg S597 is comparable to that of 0.3 nmol/kg human insulin.

### Example 14

### Co-Administration of Therapeutic Peptides

[0428] The rate of disappearance of two co-administered peptides was tested as follows:

[0429] Mixtures containing 600 nmol/ml peptide S557 and 1800 nmol/ml B²⁹-N^{ε}-(N-lithocolyl-γ-glutamyl)-des(B30) human insulin included ¹²⁵I-labeled peptides were injected into the neck of a pig. Radioactivity at the injection site was monitored over time using an external gamma counter.

[0430] The results (as illustrated in FIG. 57) indicate that the disappearance of either peptide was not influenced by the presence of the second peptide.

[0431] Incorporated herein by reference in its entirety is the Sequence Listing for the application, comprising SEQ ID NO:1 to SEQ ID NO:2227. The Sequence Listing is disclosed on three CD-ROMs, designated “CRF”, “Copy 1”, and “Copy 2”. The Sequence Listing is a computer-readable ASCII file named “18784051 US1.app.txt”, created on Aug. 8, 2002, in IBM-PC machine format, on a MS-Windows®98 operating system. The 18784051 US1.app.txt file is 927,737 bytes in size.

[0432] As various changes can be made in the above compositions and methods without departing from the scope and spirit of the invention, it is intended that all subject matter contained in the above description, shown in the accompanying drawings, or defined in the appended claims be interpreted as illustrative, and not in a limiting sense.

[0433] The contents of all patents, patent applications, published articles, books, reference manuals, texts and abstracts cited herein are hereby incorporated by reference in their entirety to more fully describe the state of the art to which the present invention pertains.

What is claimed is:

1. A method of modulating insulin receptor activity in mammalian cells comprising administering to the cells an effective amount of an amino acid sequence that comprises a first subsequence that binds to Site 1 of insulin receptor and The method according to claim 28, wherein the Site 1 sequence consists essentially of comprises a Formula 1 sequence X₁X₂X₃X₄X₅ and a second subsequence that binds to Site 2 of insulin receptor and the Site 2 sequence consists essentially of and comprises a Formula 6 sequence X₆₂ X₆₃ X₆₄ X₆₅ X₆₆ X₆₇ X₆₈ X₆₉ X₇₀ X₇₁ X₇₂ X₇₃ X₇₄ X₇₅ X₇₆ X₇₇ X₇₈ X₇₉ X₈₀ X₈₁,
wherein X₁, X₂, X₄, and X₅ are aromatic amino acids; and X₃ is any polar amino acid;, and wherein X₆₂, X₆₅, X₆₆ X₆₈, X₆₉, X₇₁, X₇₃, X₇₆, X₇₇, X₇₈, X₈₀ and X₈₁ are any amino acids acid; X₆₃, X₇₀, and X₇₄ are hydrophobic amino acids; X₆₄ is a polar amino acid; X₆₇ and X₇₅ are aromatic amino acids; and X₇₂ and X₇₉ are cysteines; and the Formula 1 and Formula 2 sequences are linked C-terminus to N-terminus and oriented Site 2 to Site 1.

2. The method according to claim 1, wherein X₁, X₂, and X₅ are selected from the group consisting of phenylalanine and tyrosine, X₃ is selected from the group consisting of aspartic acid, glutamic acid, glycine and serine, and X₄ is selected from group consisting of tryptophan, tyrosine and phenylalanine.

3. The method according to claim 2, wherein X₆₃ is selected from the group consisting of leucine, isoleucine, methionine and valine; X₇₀ and X₇₄ are selected from group consisting of valine, isoleucine, leucine and methionine; X₆₄ is selected from group consisting of aspartic acid and glutamic acid; X₆₇ is tryptophan; and X₇₅ is selected from group consisting of tyrosine and tryptophan.

4. The method of claim 3, wherein the amino acid sequence increases insulin receptor activity.

5. The method according to claim 1, wherein the Formula 1 sequence is SEQ ID NO:1554.

6. The method according to claim 1, wherein the Formula 6 sequence is SEQ ID NO:2129.

7. The method according to claim 1, wherein the Formula 1 sequence is selected from the group consisting of SEQ ID NOS:1-712; SEQ ID NOS:1221-1243; and SEQ ID NOS:1596, 1718-1719, 1556, 1560, and 1720-1776.

8. The method according to claim 1, wherein the Formula 6 sequence is selected from the group consisting of SEQ ID NOS:926-1061; SEQ ID NOS:1244-1253; and SEQ ID NOS:1596, 1718-1719, 1556, 1560, and 1720-1776.

9. The method according to claim 1, wherein the Formula 1 sequence is selected from the group consisting of S105-S116 (SEQ ID NOS:1791-1805, 1556, and 1806-1807), S131 (SEQ ID NO:1820), S137 (SEQ ID NO:1821), S158 (SEQ ID NO:1780), S165-S168 (SEQ ID NOS:1554, and 1824-1826), S171 (SEQ ID NO:1831), S175-S176 (SEQ ID NOS:1560 and 1836), S179-S184 (SEQ ID NOS:1839-1844), S214-216 (SEQ ID NOS:1845-1847), S219-223 (SEQ ID NOS:1852-1856), S227 (SEQ ID NO:1858), S234-245 (SEQ ID NOS:1869-1880), S248-S251(SEQ ID NOS:1883-1886), S264-S265 (SEQ ID NOS:1990-1991), S268 (SEQ ID NO:1903), S278 (SEQ ID NO:1905), S287 (SEQ ID NO:1911), S294-S295 (SEQ ID NOS:1922-1923), S315 (SEQ ID NO:1937), S319-322 (SEQ ID NOS:1940-1943), S326 (SEQ ID NO:1600), S342 (SEQ ID NO:1962), S365-S366 (SEQ ID NOS:1987-1988), S371-S373 (SEQ ID NOS:1558, 1900-1901), S386-S403 (SEQ ID NOS:1559, 2005-2007, 1794, 2008-2009, 1788, 1787, 1789, 2010-2011, 1791, and 2012-2014), RB437 (SEQ ID NO:2164), RB502 (SEQ ID NO:2170), RB452 (SEQ ID NO:2173), RB513 (SEQ ID NO:2176), RB464 (SEQ ID NO:2179), RB596 (SEQ ID NO:2202), RB569 (SEQ ID NO:2203), and RB570 (SEQ ID NO:2204).

10. The method according to claim 1, wherein the Formula 6 sequence is selected from the group consisting of S256 (SEQ ID NO:1893), S263 (SEQ ID NO:1899), S266 (SEQ ID NO:1902), S284-285 (SEQ ID NOS:1909-1910), S515 (SEQ ID NO:2102), and RB426 (SEQ ID NO:2158).

11. The method according to claim 1, wherein the Formula 1 sequence is selected from the group consisting of SEQ ID NO:1556; SEQ ID NO:1557; SEQ ID NO:1558; SEQ ID NO:1559; SEQ ID NO:1561; SEQ ID NO:1562; SEQ ID NO:1563; SEQ ID NO:1564; SEQ ID NO:1565; SEQ ID NO:1566; SEQ ID NO:1567; SEQ ID NO:1568; SEQ ID NO:2130; and SEQ ID NO:1560.

12. The method according to claim 1, wherein the Formula 6 sequence is a D8 sequence selected from the group consisting of: SEQ ID NO:2227; SEQ ID NO:1579; SEQ ID NO:1580; SEQ ID NO:1581; SEQ ID NO:1582; SEQ ID NO:1583; and SEQ ID NO:1584.

13. The method according to claim 1, wherein the amino acid sequence is sequence 539 (SEQ ID NO:2116).

14. The method according to claim 1, wherein the amino acid sequence is selected from the group consisting of RP27 (SEQ ID NO:2213), RP28 (SEQ ID NO:2214), RP29 (SEQ ID NO:2215), RP30 (SEQ ID NO:2216), RP31 (SEQ ID NO:2217), RP32 (SEQ ID NO:2218), RP33 (SEQ ID NO:2219), RP34 (SEQ ID NO:2220), RP35 (SEQ ID NO:2221), and RP36 (SEQ ID NO:2222).

15. The method according to claim 1, wherein the amino acid sequence is selected from the group consisting of D8-6aa-S175 (SEQ ID NO:2121), D8-12aa-S175 (SEQ ID NO:2122), D8-6aa-RP6 (SEQ ID NO:2126), and D8-6aa-RP17 (SEQ ID NO:2127).

16. The method according to claim 1, wherein the amino acid sequence is selected from the group consisting of S429 (SEQ ID NO:2032), S455 (SEQ ID NO:2060), S457-S458 (SEQ ID NOS:2063-2064), S467-S468 (SEQ ID NOS:2066-2067), S471 (SEQ ID NO:2068), S481-S513 (SEQ ID NOS:2069-2101), S517-S520 (SEQ ID NOS:2104-2107), S524 (SEQ ID NO:2111), RB539 (SEQ ID NO:2196), RB625—RB626 (SEQ ID NOS:2200 and 2199), and RB622 (SEQ ID NO:2201).

17. The method according to claim 1, wherein the amino acid sequence is selected from the group consisting of: S527-S546 (SEQ ID NOS:2228-2247); S549 (SEQ ID NO:2250), S551-S591 (SEQ ID NOS:2252-2300); S594-S624 (SEQ ID NOS:2303-2332); S626-S639 (SEQ ID NOS:2334-2347); and S641-S648 (SEQ ID NOS:2349-2356).

18. The method according to claim 16, wherein the amino acid sequence is selected from the group consisting of S557 (SEQ ID NO:2258) and S597 (SEQ ID NO:2306).

19. The method according to claim 4, wherein the mammalian cell is in a mammal.

20. The method according to claim 19, wherein the mammal is a human suffering from diabetes and the method comprises delivering a therapeutically effective amount of the amino acid to the human as a diabetes treatment.

The application's sequence listing, which the Patent Office published only in electronic form, follows.

SEQUENCE LISTING (2357 sequences)

SEQ ID NO: 1 - protein, 40 aa, Artificial Sequence
  Description of Artificial Sequence: Synthetic peptide
IRDMHYVWVQDRDRYINGVRQWYISDRYNPGSAFYRWFID

SEQ ID NO: 2 - protein, 40 aa, Artificial Sequence
  Description of Artificial Sequence: Synthetic peptide
RMGLQALAHYRKSAGPIFLSSGSVIKGSEGDPFYAWFRLQ

SEQ ID NO: 3 - protein, 40 aa, Artificial Sequence
  Description of Artificial Sequence: Synthetic peptide
MPVSLFRRVWDYRDGEHETLESHYVVPQAALDRLFYSWFS

SEQ ID NO: 4 - protein, 40 aa, Artificial Sequence
  Description of Artificial Sequence: Synthetic peptide
PLYGGGIHLYYPGTMGYVPGFPRQVKVLGDADKNFYDWFM

SEQ ID NO: 5 - protein, 39 aa, Artificial Sequence
  Description of Artificial Sequence: Synthetic peptide
YRGMLVLGRISDGAGKVASEPPARIGQKVFAVNFYDWFV

SEQ ID NO: 6 - protein, 39 aa, Artificial Sequence
  Description of Artificial Sequence: Synthetic peptide
SGCCRLLGLRWMFIVIVGWSGALVCQSAASAAGFYDWFV

SEQ ID NO: 7 - protein, 21 aa, Artificial Sequence
  Description of Artificial Sequence: Synthetic peptide
IGGQGQHQDGNFYDWFVEALA

SEQ ID NO: 8 - protein, 20 aa, Artificial Sequence
  Description of Artificial Sequence: Synthetic peptide
VFWNCRSQQLDFYEWFEQAA

SEQ ID NO: 9 - protein, 26 aa, Artificial Sequence
  Description of Artificial Sequence: Synthetic peptide
RVAGAISAPGLVSNKQDGLFYSWFRE

SEQ ID NO: 10 - protein, 20 aa, Artificial Sequence
  Description of Artificial Sequence: Synthetic peptide
VLQARHGCDSVSDCFYEWFA

SEQ ID NO: 11 - protein, 20 aa, Artificial Sequence
  Description of Artificial Sequence: Synthetic peptide
GAFYRWFHEALVGSERVPDV

SEQ ID NO: 12 - protein, 20 aa, Artificial Sequence
  Description of Artificial Sequence: Synthetic peptide
HEAFYDWFSALVDGGYELMG

SEQ ID NO: 13 - protein, 20 aa, Artificial Sequence
  Description of Artificial Sequence: Synthetic peptide
RIGGGWARSEGFYEWFVREL

SEQ ID NO: 14 - protein, 20 aa, Artificial Sequence
  Description of Artificial Sequence: Synthetic peptide
  MOD_RES (7): Unknown amino acid
  MOD_RES (11): Unknown amino acid
LPAGGAXGFAXRGFYEWFES

SEQ ID NO: 15 - protein, 20 aa, Artificial Sequence
  Description of Artificial Sequence: Synthetic peptide
GHSWALVRHVDRLFYEWFDL

SEQ ID NO: 16 - protein, 20 aa, Artificial Sequence
  Description of Artificial Sequence: Synthetic peptide
LGTSAGQGVGHRAFYQWFQS

SEQ ID NO: 17 - protein, 20 aa, Artificial Sequence
  Description of Artificial Sequence: Synthetic peptide
RGGGTFYEWFESALRKHGAG

SEQ ID NO: 18 - protein, 20 aa, Artificial Sequence
  Description of Artificial Sequence: Synthetic peptide
NSSGQQVVGLTFYSWFASQV

SEQ ID NO: 19 - protein, 20 aa, Artificial Sequence
  Description of Artificial Sequence: Synthetic peptide
FYGWFSRQLSLTPRDDWGLP

SEQ ID NO: 20 - protein, 20 aa, Artificial Sequence
  Description of Artificial Sequence: Synthetic peptide
RMFYEWFWSQMGAGPTEGSA

SEQ ID NO: 21 - protein, 21 aa, Artificial Sequence
  Description of Artificial Sequence: Synthetic peptide
IGGQGQHQDGNFYDWFVEALA

SEQ ID NO: 22 - protein, 20 aa, Artificial Sequence
  Description of Artificial Sequence: Synthetic peptide
RDKPTDQEEQNWSFYEWFRH

SEQ ID NO: 23 - protein, 20 aa, Artificial Sequence
  Description of Artificial Sequence: Synthetic peptide
WSALLSVMDTGFYAWFDDAV

SEQ ID NO: 24 - protein, 20 aa, Artificial Sequence
  Description of Artificial Sequence: Synthetic peptide
SRDQTNFTFNSAGFYGWFER

SEQ ID NO: 25 - protein, 17 aa, Artificial Sequence
  Description of Artificial Sequence: Synthetic peptide
GVGTLTMSSDAFYTWFV

SEQ ID NO: 26 - protein, 16 aa, Artificial Sequence
  Description of Artificial Sequence: Synthetic peptide
IGGSFVEFYGWFNDQV

SEQ ID NO: 27 - protein, 20 aa, Artificial Sequence
  Description of Artificial Sequence: Synthetic peptide
DIGSDGHGRRWDSFYRWFEM

SEQ ID NO: 28 - protein, 20 aa, Artificial Sequence
  Description of Artificial Sequence: Synthetic peptide
VLQARHGCDSVSDCFYEWFA

SEQ ID NO: 29 - protein, 20 aa, Artificial Sequence
  Description of Artificial Sequence: Synthetic peptide
DPERMQSDVGFYEWFRAAVG

SEQ ID NO: 30 - protein, 20 aa, Artificial Sequence
  Description of Artificial Sequence: Synthetic peptide
DPERMQSDVGFYEWFRAAVG

SEQ ID NO: 31 - protein, 20 aa, Artificial Sequence
  Description of Artificial Sequence: Synthetic peptide
DIGSDGHGRRWDSFYRWFEM

SEQ ID NO: 32 - protein, 20 aa, Artificial Sequence
  Description of Artificial Sequence: Synthetic peptide
PFYQWFLDQSVGGSRGGGLR

SEQ ID NO: 33 - protein, 20 aa, Artificial Sequence
  Description of Artificial Sequence: Synthetic peptide
AVAPLSVRGRDSGFYSWFSS

SEQ ID NO: 34 - protein, 21 aa, Artificial Sequence
  Description of Artificial Sequence: Synthetic peptide
  MOD_RES (1)..(10): Variable amino acid
  MOD_RES (18)..(21): Variable amino acid
XXXXXXXXXXNFYDWFVXXXX

SEQ ID NO: 35 - protein, 21 aa, Artificial Sequence
  Description of Artificial Sequence: Synthetic peptide
GRVDWLQRNANFYDWFVAELG

SEQ ID NO: 36 - protein, 21 aa, Artificial Sequence
  Description of Artificial Sequence: Synthetic peptide
RMYFSTGAPQNFYDWFVQEWD

SEQ ID NO: 37 - protein, 21 aa, Artificial Sequence
  Description of Artificial Sequence: Synthetic peptide
HHTQGLQVQRNFYDWFVNELR

SEQ ID NO: 38 - protein, 21 aa, Artificial Sequence
  Description of Artificial Sequence: Synthetic peptide
MHRMQHDGTSNFYDWFVLQWA

SEQ ID NO: 39 - protein, 21 aa, Artificial Sequence
  Description of Artificial Sequence: Synthetic peptide
AMHVVAQGGPNFYDWFVRELR

SEQ ID NO: 40 - protein, 21 aa, Artificial Sequence
  Description of Artificial Sequence: Synthetic peptide
AIQMNGNLAFNFYDWFVRELT

SEQ ID NO: 41 - protein, 21 aa, Artificial Sequence
  Description of Artificial Sequence: Synthetic peptide
TDRKSVQEPRNFYDWFVWAAR

SEQ ID NO: 42 - protein, 21 aa, Artificial Sequence
  Description of Artificial Sequence: Synthetic peptide
PHGHRGFAQSNFYDWFVTQEE

SEQ ID NO: 43 - protein, 21 aa, Artificial Sequence
  Description of Artificial Sequence: Synthetic peptide
RLASASVPGQNFYDWFVDQLL

SEQ ID NO: 44 - protein, 21 aa, Artificial Sequence
  Description of Artificial Sequence: Synthetic peptide
RQSEFSTLNSNFYDWFVRELE

SEQ ID NO: 45 - protein, 21 aa, Artificial Sequence
  Description of Artificial Sequence: Synthetic peptide
GQAQLSIRDVNFYDWFVQQLV

SEQ ID NO: 46 - protein, 21 aa, Artificial Sequence
  Description of Artificial Sequence: Synthetic peptide
MSEPAVGVNGNFYDWFVAQLF

SEQ ID NO: 47 - protein, 21 aa, Artificial Sequence
  Description of Artificial Sequence: Synthetic peptide
VGTGRARLDRNFYDWFVGQYS

SEQ ID NO: 48 - protein, 21 aa, Artificial Sequence
  Description of Artificial Sequence: Synthetic peptide
SREAVQKRNANFYDWFVQQLS

SEQ ID NO: 49 - protein, 21 aa, Artificial Sequence
  Description of Artificial Sequence: Synthetic peptide
LAQFAGSRNQNFYDWFVEQLG

SEQ ID NO: 50 - protein, 21 aa, Artificial Sequence
  Description of Artificial Sequence: Synthetic peptide
GQEYFDQMGLNFYDWFVRELD

SEQ ID NO: 51 - protein, 21 aa, Artificial Sequence
  Description of Artificial Sequence: Synthetic peptide
RQPSQPPHGSNFYDWFVEAIN

SEQ ID NO: 52 - protein, 21 aa, Artificial Sequence
  Description of Artificial Sequence: Synthetic peptide
LMQSLGSGSTNFYDWFVQQMV

SEQ ID NO: 53 - protein, 21 aa, Artificial Sequence
  Description of Artificial Sequence: Synthetic peptide
DQQRSACDGTNFYDWFVCQLS

SEQ ID NO: 54 - protein, 21 aa, Artificial Sequence
  Description of Artificial Sequence: Synthetic peptide
LDGTKACQRVNFYDWFVCQTE

SEQ ID NO: 55 - protein, 21 aa, Artificial Sequence
  Description of Artificial Sequence: Synthetic peptide
PEARRTVVHSNFYDWFVAQLS

SEQ ID NO: 56 - protein, 21 aa, Artificial Sequence
  Description of Artificial Sequence: Synthetic peptide
PWMLSVGIQDNFYDWFVGLDS

SEQ ID NO: 57 - protein, 21 aa, Artificial Sequence
  Description of Artificial Sequence: Synthetic peptide
ASHQRGGSSDNFYDWFVAQMR

SEQ ID NO: 58 - protein, 21 aa, Artificial Sequence
  Description of Artificial Sequence: Synthetic peptide
TLEREGEFSGNFYDWFVEQLH

SEQ ID NO: 59 - protein, 21 aa, Artificial Sequence
  Description of Artificial Sequence: Synthetic peptide
DRQSIGSVHGDFYDWFVSALG

SEQ ID NO: 60 - protein, 21 aa, Artificial Sequence
  Description of Artificial Sequence: Synthetic peptide
DWDKLGSLSENFYDWFVDQLA

SEQ ID NO: 61 - protein, 21 aa, Artificial Sequence
  Description of Artificial Sequence: Synthetic peptide
VRVVLNQSGRNFYDWFVIQLE

SEQ ID NO: 62 - protein, 21 aa, Artificial Sequence
  Description of Artificial Sequence: Synthetic peptide
MASWQSRTPDNFYDWFVRELS

SEQ ID NO: 63 - protein, 21 aa, Artificial Sequence
  Description of Artificial Sequence: Synthetic peptide
TTCHPRGEDCNFYDWFVLQLR

SEQ ID NO: 64 - protein, 21 aa, Artificial Sequence
  Description of Artificial Sequence: Synthetic peptide
VRGNDSVLRANFYDWFVDQLS

SEQ ID NO: 65 - protein, 21 aa, Artificial Sequence
  Description of Artificial Sequence: Synthetic peptide
TPRSQVRSDHNFYDWFVYQLA

SEQ ID NO: 66 - protein, 21 aa, Artificial Sequence
  Description of Artificial Sequence: Synthetic peptide
ESLTGSRPDRNFYDWFVQQTS

SEQ ID NO: 67 - protein, 21 aa, Artificial Sequence
  Description of Artificial Sequence: Synthetic peptide
PQSLTEVRTGNFYDWFVVQLH

SEQ ID NO: 68 - protein, 21 aa, Artificial Sequence
  Description of Artificial Sequence: Synthetic peptide
DVGMGRVKETNFYDWFVRQLI

SEQ ID NO: 69 - protein, 21 aa, Artificial Sequence
  Description of Artificial Sequence: Synthetic peptide
GADDIRSLNTNFYDWFVNQLS

SEQ ID NO: 70 - protein, 21 aa, Artificial Sequence
  Description of Artificial Sequence: Synthetic peptide
GVSIQAGYKTNFYDWFVEAVR

SEQ ID NO: 71 - protein, 21 aa, Artificial Sequence
  Description of Artificial Sequence: Synthetic peptide
VGEHRQMSVGNFYDWFVMQIA

SEQ ID NO: 72 - protein, 21 aa, Artificial Sequence
  Description of Artificial Sequence: Synthetic peptide
GSSLGRSGPGNFYDWFVDQLE

SEQ ID NO: 73 - protein, 21 aa, Artificial Sequence
  Description of Artificial Sequence: Synthetic peptide
HRQQDVVRQGNFYDWFVQALE

SEQ ID NO: 74 - protein, 21 aa, Artificial Sequence
  Description of Artificial Sequence: Synthetic peptide
QDTFLTAREGNFYDWFIRALE

SEQ ID NO: 75 - protein, 21 aa, Artificial Sequence
  Description of Artificial Sequence: Synthetic peptide
EAIMREEGQANFYDWFVRQLE

SEQ ID NO: 76 - protein, 21 aa, Artificial Sequence
  Description of Artificial Sequence: Synthetic peptide
VCDVSTGGGTNFYDWFVCQVG

SEQ ID NO: 77 - protein, 21 aa, Artificial Sequence
  Description of Artificial Sequence: Synthetic peptide
PQPRSASTPLNFYDWFVQATG

SEQ ID NO: 78 - protein, 21 aa, Artificial Sequence
  Description of Artificial Sequence: Synthetic peptide
GVSRGSGGDPNFYDWFVMQLR

SEQ ID NO: 79 - protein, 21 aa, Artificial Sequence
  Description of Artificial Sequence: Synthetic peptide
GPGRHDSSRGNFYDWFVEQLA

SEQ ID NO: 80 - protein, 21 aa, Artificial Sequence
  Description of Artificial Sequence: Synthetic peptide
ERFALEVQGSNFYDWFVRQVI

SEQ ID NO: 81 - protein, 20 aa, Artificial Sequence
  Description of Artificial Sequence: Synthetic peptide
NLKSSATVGGNFYDWFVEQL

SEQ ID NO: 82 - protein, 21 aa, Artificial Sequence
  Description of Artificial Sequence: Synthetic peptide
MEGPPAGGPLNFYDWFVAQVD

SEQ ID NO: 83 - protein, 21 aa, Artificial Sequence
  Description of Artificial Sequence: Synthetic peptide
RLDVAGHRGGNFYDWFVKQLH

SEQ ID NO: 84 - protein, 21 aa, Artificial Sequence
  Description of Artificial Sequence: Synthetic peptide
PWSDHEALNQNFYDWFVSQVL

SEQ ID NO: 85 - protein, 21 aa, Artificial Sequence
  Description of Artificial Sequence: Synthetic peptide
EDRLGNGESTNFYDWFVRQLA

SEQ ID NO: 86 - protein, 21 aa, Artificial Sequence
  Description of Artificial Sequence: Synthetic peptide
GKLVASTLDDNFYDWFVRQLS

SEQ ID NO: 87 - protein, 21 aa, Artificial Sequence
  Description of Artificial Sequence: Synthetic peptide
SGPVVQTQNGNFYDWFVHQLR

SEQ ID NO: 88 - protein, 21 aa, Artificial Sequence
  Description of Artificial Sequence: Synthetic peptide
VDRAGPAGSDNFYDWFVAQLD

SEQ ID NO: 89 - protein, 21 aa, Artificial Sequence
  Description of Artificial Sequence: Synthetic peptide
SLGRNDRPDENFYDWFVSQVQ

SEQ ID NO: 90 - protein, 21 aa, Artificial Sequence
  Description of Artificial Sequence: Synthetic peptide
RVMATANAPMNFYDWFVVQLQ

SEQ ID NO: 91 - protein, 21 aa, Artificial Sequence
  Description of Artificial Sequence: Synthetic peptide
NGVERAGTGDNFYDWFVAQLH

SEQ ID NO: 92 - protein, 21 aa, Artificial Sequence
  Description of Artificial Sequence: Synthetic peptide
PFAGKGDKTGNFYDWFVSLTG

SEQ ID NO: 93 - protein, 21 aa, Artificial Sequence
  Description of Artificial Sequence: Synthetic peptide
GMPQEYMDQVNFYDWFVAQVD

SEQ ID NO: 94 - protein, 21 aa, Artificial Sequence
  Description of Artificial Sequence: Synthetic peptide
MGTPAVGDGANFYDWFVRQLG

SEQ ID NO: 95 - protein, 21 aa, Artificial Sequence
  Description of Artificial Sequence: Synthetic peptide
SKCKAWYGANNFYDWFVWQVD

SEQ ID NO: 96 - protein, 21 aa, Artificial Sequence
  Description of Artificial Sequence: Synthetic peptide
EAASLGSQDRNFYDWFVRQVV

SEQ ID NO: 97 - protein, 21 aa, Artificial Sequence
  Description of Artificial Sequence: Synthetic peptide
VERSASSQDGNFYDWFVVQIR

SEQ ID NO: 98 - protein, 21 aa, Artificial Sequence
  Description of Artificial Sequence: Synthetic peptide
TSEVQRRSQDNFYDWFVAQVA

SEQ ID NO: 99 - protein, 21 aa, Artificial Sequence
  Description of Artificial Sequence: Synthetic peptide
ERSAAGFREGNFYDWFVAQVN

SEQ ID NO: 100 - protein, 21 aa, Artificial Sequence
  Description of Artificial Sequence: Synthetic peptide
RAERGSMRDSNFYDWFVQQLP

SEQ ID NO: 101 - protein, 21 aa, Artificial Sequence
  Description of Artificial Sequence: Synthetic peptide
LAMSVASRPANFYDWFVAQIV

SEQ ID NO: 102 - protein, 21 aa, Artificial Sequence
  Description of Artificial Sequence: Synthetic peptide
HNSSSPMRTGNFYDWFVQELR

SEQ ID NO: 103 - protein, 20 aa, Artificial Sequence
  Description of Artificial Sequence: Synthetic peptide
SALSGPVQPINFYDWFVTGM

SEQ ID NO: 104 - protein, 21 aa, Artificial Sequence
  Description of Artificial Sequence: Synthetic peptide
GAQAIREIHHNFYDWFVAQVT

SEQ ID NO: 105 - protein, 21 aa, Artificial Sequence
  Description of Artificial Sequence: Synthetic peptide
RGQRESDSGTNFYDWFVGAIR

SEQ ID NO: 106 - protein, 21 aa, Artificial Sequence
  Description of Artificial Sequence: Synthetic peptide
VQEGLSGMEGNFYDWFVDQLF

SEQ ID NO: 107 - protein, 21 aa, Artificial Sequence
  Description of Artificial Sequence: Synthetic peptide
RLDRSSTSGVNFYDWFVAQVG

SEQ ID NO: 108 - protein, 21 aa, Artificial Sequence
  Description of Artificial Sequence: Synthetic peptide
GSQHSGREPHNFYDWFVAQVG

SEQ ID NO: 109 - protein, 21 aa, Artificial Sequence
  Description of Artificial Sequence: Synthetic peptide
GRGDQRHETTNFYDWFVRELQ

SEQ ID NO: 110 - protein, 21 aa, Artificial Sequence
  Description of Artificial Sequence: Synthetic peptide
PRMVEKPSEDNFYDWFVTQLS

SEQ ID NO: 111 - protein, 21 aa, Artificial Sequence
  Description of Artificial Sequence: Synthetic peptide
RVGIQVDPHTNFYDWFVIQLT

SEQ ID NO: 112 - protein, 21 aa, Artificial Sequence
  Description of Artificial Sequence: Synthetic peptide
RSSGGLLSQGNFYDWFVSQLE

SEQ ID NO: 113 - protein, 21 aa, Artificial Sequence
  Description of Artificial Sequence: Synthetic peptide
SDARQAGLQENFYDWFVSQVR

SEQ ID NO: 114 - protein, 21 aa, Artificial Sequence
  Description of Artificial Sequence: Synthetic peptide
PPYRSSRLGENFYDWFVMQVR

SEQ ID NO: 115 - protein, 21 aa, Artificial Sequence
  Description of Artificial Sequence: Synthetic peptide
QEVTRTRDDKNFYDWFVSQIF

SEQ ID NO: 116 - protein, 21 aa, Artificial Sequence
  Description of Artificial Sequence: Synthetic peptide
SRAPYGSTAGNFYDWFVQAVS

SEQ ID NO: 117 - protein, 21 aa, Artificial Sequence
  Description of Artificial Sequence: Synthetic peptide
  MOD_RES (1): Unknown amino acid
XDGQSVSSKGNFYDWFVQQMT

SEQ ID NO: 118 - protein, 21 aa, Artificial Sequence
  Description of Artificial Sequence: Synthetic peptide
RLMGGIAEPQNFYDWFVREVA

SEQ ID NO: 119 - protein, 21 aa, Artificial Sequence
  Description of Artificial Sequence: Synthetic peptide
SAGHHMPRESNFYDWFVDQVV

SEQ ID NO: 120 - protein, 21 aa, Artificial Sequence
  Description of Artificial Sequence: Synthetic peptide
LGAAETWDGINFYDWFVKQVS

SEQ ID NO: 121 - protein, 21 aa, Artificial Sequence
  Description of Artificial Sequence: Synthetic peptide
VGHSGVPPYPNFYDWFVMQVS

SEQ ID NO: 122 - protein, 21 aa, Artificial Sequence
  Description of Artificial Sequence: Synthetic peptide
VTMLDKGAQDNFYDWFVREVA

SEQ ID NO: 123 - protein, 21 aa, Artificial Sequence
  Description of Artificial Sequence: Synthetic peptide
HHSPGNEHGYNFYDWFVLQVA

SEQ ID NO: 124 - protein, 21 aa, Artificial Sequence
  Description of Artificial Sequence: Synthetic peptide
GSIAQLIMRANFYDWFVEQTN

SEQ ID NO: 125 - protein, 21 aa, Artificial Sequence
  Description of Artificial Sequence: Synthetic peptide
LKGSSQPLSVNFYDWFVQQIK

SEQ ID NO: 126 - protein, 21 aa, Artificial Sequence
  Description of Artificial Sequence: Synthetic peptide
PASNKNSLAENFYDWFVQQTR

SEQ ID NO: 127 - protein, 21 aa, Artificial Sequence
  Description of Artificial Sequence: Synthetic peptide
HVEHMAVGDGNFYDWFVVQLR

SEQ ID NO: 128 - protein, 21 aa, Artificial Sequence
  Description of Artificial Sequence: Synthetic peptide
RGMTGMVGRGNFYDWFVGQLR

SEQ ID NO: 129 - protein, 21 aa, Artificial Sequence
  Description of Artificial Sequence: Synthetic peptide
GLRSEQGNRLNFYDWFVAQIA

SEQ ID NO: 130 - protein, 21 aa, Artificial Sequence
  Description of Artificial Sequence: Synthetic peptide
RVREKLPRPENFYDWFVNQIH

SEQ ID NO: 131 - protein, 21 aa, Artificial Sequence
  Description of Artificial Sequence: Synthetic peptide
SNPSRQDASVNFYDWFVREVA

SEQ ID NO: 132 - protein, 21 aa, Artificial Sequence
  Description of Artificial Sequence: Synthetic peptide
QSVDLSRPDSNFYDWFVEVLS

SEQ ID NO: 133 - protein, 21 aa, Artificial Sequence
  Description of Artificial Sequence: Synthetic peptide
IGGQGQHQDGNFYDWFVEALA

SEQ ID NO: 134 - protein, 21 aa, Artificial Sequence
  Description of Artificial Sequence: Synthetic peptide
VEVQRHIRKDNFYDWFVKQID

SEQ ID NO: 135 - protein, 21 aa, Artificial Sequence
  Description of Artificial Sequence: Synthetic peptide
CWARPCGDAANFYDWFVQQAS

SEQ ID NO: 136 - protein, 21 aa, Artificial Sequence
  Description of Artificial Sequence: Synthetic peptide
RHERGKEGPGNFYDWFVSQVV

SEQ ID NO: 137 - protein, 21 aa, Artificial Sequence
  Description of Artificial Sequence: Synthetic peptide
ERSPRPALASNFYDWFVQQVV

SEQ ID NO: 138 - protein, 21 aa, Artificial Sequence
  Description of Artificial Sequence: Synthetic peptide
IARMRETFQPNFYDWFVDQLA

SEQ ID NO: 139 - protein, 21 aa, Artificial Sequence
  Description of Artificial Sequence: Synthetic peptide
GRGQGLKRPDNFYDWFVAAAK

SEQ ID NO: 140 - protein, 21 aa, Artificial Sequence
  Description of Artificial Sequence: Synthetic peptide
YSIEVQDWNENFYDWFVSQLG

SEQ ID NO: 141 - protein, 21 aa, Artificial Sequence
  Description of Artificial Sequence: Synthetic peptide
TWMWEERKQDNFYDWFVGQLK

SEQ ID NO: 142 - protein, 21 aa, Artificial Sequence
  Description of Artificial Sequence: Synthetic peptide
VTFTSAVFHENFYDWFVRQVS

SEQ ID NO: 143 - protein, 21 aa, Artificial Sequence
  Description of Artificial Sequence: Synthetic peptide
LAINDLVTHKNFYDWFVDQLR

SEQ ID NO: 144 - protein, 21 aa, Artificial Sequence
  Description of Artificial Sequence: Synthetic peptide
GAVGLAEAGPNFYDWFVSQVQ

SEQ ID NO: 145 - protein, 21 aa, Artificial Sequence
  Description of Artificial Sequence: Synthetic peptide
RYRGERHDGRNFYDWFVEQVN

SEQ ID NO: 146 - protein, 21 aa, Artificial Sequence
  Description of Artificial Sequence: Synthetic peptide
QGAEGRLSEGNFYDWFVQAVS

SEQ ID NO: 147 - protein, 21 aa, Artificial Sequence
  Description of Artificial Sequence: Synthetic peptide
PRLHMGSDMGDFYDWFVVQIA

SEQ ID NO: 148 - protein, 21 aa, Artificial Sequence
  Description of Artificial Sequence: Synthetic peptide
IVAGARHSEVNFYDWFVIQVR

SEQ ID NO: 149 - protein, 21 aa, Artificial Sequence
  Description of Artificial Sequence: Synthetic peptide
AELVGAGVRGNFYDWFVDQLV

SEQ ID NO: 150 - protein, 21 aa, Artificial Sequence
  Description of Artificial Sequence: Synthetic peptide
DSSRLWLGERNFYDWFVAQIS

SEQ ID NO: 151 - protein, 21 aa, Artificial Sequence
  Description of Artificial Sequence: Synthetic peptide
VGQVGRYVRSNFYDWFVQQAM

SEQ ID NO: 152 - protein, 21 aa, Artificial Sequence
  Description of Artificial Sequence: Synthetic peptide
RPQLVESGSKNFYDWFVQVVR

SEQ ID NO: 153 - protein, 21 aa, Artificial Sequence
  Description of Artificial Sequence: Synthetic peptide
RIHNQTERGGNFYDWFVHQLV

SEQ ID NO: 154 - protein, 21 aa, Artificial Sequence
  Description of Artificial Sequence: Synthetic peptide
EMYGDTSERVNFYDWFVSALQ

SEQ ID NO: 155 - protein, 21 aa, Artificial Sequence
  Description of Artificial Sequence: Synthetic peptide
RVGSGMEDLGNFYDWFVRQAQ

SEQ ID NO: 156 - protein, 21 aa, Artificial Sequence
  Description of Artificial Sequence: Synthetic peptide
KDPVTVSQGRNFYDWFVVQIQ

SEQ ID NO: 157 - protein, 22 aa, Artificial Sequence
  Description of Artificial Sequence: Synthetic peptide
DARDHGVWVMSNFYDWFVAQVS

SEQ ID NO: 158 - protein, 21 aa, Artificial Sequence
  Description of Artificial Sequence: Synthetic peptide
VATVHVGGGMNFYDWFVAQVG

SEQ ID NO: 159 - protein, 21 aa, Artificial Sequence
  Description of Artificial Sequence: Synthetic peptide
CADPGACSSLNFYDWFVQMRG

SEQ ID NO: 160 - protein, 21 aa, Artificial Sequence
  Description of Artificial Sequence: Synthetic peptide
NPTSVQQYGVNFYDWFVNVLS

SEQ ID NO: 161 - protein, 21 aa, Artificial Sequence
  Description of Artificial Sequence: Synthetic peptide
RPSLPEVRPGNFYDWFVQSVR

SEQ ID NO: 162 - protein, 21 aa, Artificial Sequence
  Description of Artificial Sequence: Synthetic peptide
SLQGADFQQGNFYDWFVSELA

SEQ ID NO: 163 - protein, 21 aa, Artificial Sequence
  Description of Artificial Sequence: Synthetic peptide
LSSRGRVTMRNFYDWFVAQVV

SEQ ID NO: 164 - protein, 21 aa, Artificial Sequence
  Description of Artificial Sequence: Synthetic peptide
HKSWTTMSPLNFYDWFVAQVE

SEQ ID NO: 165 - protein, 21 aa, Artificial Sequence
  Description of Artificial Sequence: Synthetic peptide
RPVIGGGGTRNFYDWFVAQMI

SEQ ID NO: 166 - protein, 21 aa, Artificial Sequence
  Description of Artificial Sequence: Synthetic peptide
YDQDPPYWGLNFYDWFVREVA

SEQ ID NO: 167 - protein, 39 aa, Artificial Sequence; identical to SEQ ID NO: 5
  Description of Artificial Sequence: Synthetic peptide

SEQ ID NO: 168 - protein, 39 aa, Artificial Sequence
  Description of Artificial Sequence: Synthetic peptide
QRGMLVRGRISHGAGKIAYEPPDCLGQKACAVNFYDWFV

SEQ ID NO: 169 - protein, 39 aa, Artificial Sequence
  Description of Artificial Sequence: Synthetic peptide
QRGMLLLGRISDDAGKVASEPSARRGQKVFAFNFYDWFV

SEQ ID NO: 170 - protein, 38 aa, Artificial Sequence
  Description of Artificial Sequence: Synthetic peptide
YRGILVLGRISEGAGKVASEPAARIGQKVFADFYDWFV

SEQ ID NO: 171 - protein, 39 aa, Artificial Sequence
  Description of Artificial Sequence: Synthetic peptide
QRGMLALGRISDGAGKVASEPPAGIGQKVFAFNFYDWFV

SEQ ID NO: 172 - protein, 39 aa, Artificial Sequence
  Description of Artificial Sequence: Synthetic peptide
FRGRLVLGHFSDGAGKVGSEPAARIGQKVFDVNFYDWFV

SEQ ID NO: 173 - protein, 39 aa, Artificial Sequence
  Description of Artificial Sequence: Synthetic peptide
YRGMLVLGRISDGAGKVASEPPARIGQEVFADNFYDWFV

SEQ ID NO: 174 - protein, 39 aa, Artificial Sequence
  Description of Artificial Sequence: Synthetic peptide
YRGMLVLGRISDGAGEVASEPPARIGQEVFALNFYDWFV

SEQ ID NO: 175 - protein, 39 aa, Artificial Sequence
  Description of Artificial Sequence: Synthetic peptide
VPWYAGSGSSSDGAGKVASEPPARIDQKVFAVNFYDWFV

SEQ ID NO: 176 - protein, 39 aa, Artificial Sequence
  Description of Artificial Sequence: Synthetic peptide
YRGQLVLGRISYGAGKVGCDPPARIGQKDWAVNFYDWFV

SEQ ID NO: 177 - protein, 39 aa, Artificial Sequence
  Description of Artificial Sequence: Synthetic peptide
QRGLLVLGRFSDGAGNVASEPPAGIGQEVFPVNFYDWFV

SEQ ID NO: 178 - protein, 39 aa, Artificial Sequence
  Description of Artificial Sequence: Synthetic peptide
QRGMLVLGRISDGAGKVAAEPPDCLGQKVCAVNFYDWFV

SEQ ID NO: 179 - protein, 39 aa, Artificial Sequence
  Description of Artificial Sequence: Synthetic peptide
QRGMRVLGRISDGAGKVASELPPRIGQKDFAVNFYDWFV

SEQ ID NO: 180 - protein, 39 aa, Artificial Sequence
  Description of Artificial Sequence: Synthetic peptide
QRGMLVLGSISDGAGKVAYEAPARIGQTVFAVNFYDWFV

SEQ ID NO: 181 - protein, 39 aa, Artificial Sequence
  Description of Artificial Sequence: Synthetic peptide
QPWCAGSGRIYDGACKVASEPPAHIGQEVFAVNFYDWFV

SEQ ID NO: 182 - protein, 39 aa, Artificial Sequence
  Description of Artificial Sequence: Synthetic peptide
QRGMLVLDRISDGAGKVASGPPARIGQNVLAVNFYDWFV

SEQ ID NO: 183 - protein, 39 aa, Artificial Sequence
  Description of Artificial Sequence: Synthetic peptide
YRGMLVVGRISDGTGKVASQPPARIGQKVFAVNFYDWFV

SEQ ID NO: 184 - protein, 39 aa, Artificial Sequence
  Description of Artificial Sequence: Synthetic peptide
YRGMLVLGRISDGAGKVASVPPAHIGQKVFAFNFYDWFV

SEQ ID NO: 185 - protein, 39 aa, Artificial Sequence
  Description of Artificial Sequence: Synthetic peptide
QHGMLVLGRVSVGAGKVPSEPQARIGHKVFDVNFYDWFV

SEQ ID NO: 186 - protein, 39 aa, Artificial Sequence
  Description of Artificial Sequence: Synthetic peptide
YSGYAGSGSFSDGAGKVASEPPARISQEVLADNFYDWFV

SEQ ID NO: 187 - protein, 39 aa, Artificial Sequence
  Description of Artificial Sequence: Synthetic peptide
YRGMLVLGRISDGAGKVASEPPARIGQKVSAVNFYDWFV

SEQ ID NO: 188 - protein, 39 aa, Artificial Sequence
  Description of Artificial Sequence: Synthetic peptide
YHGKLDLGRISVGVGKVASEPPARIGQKVFADNFYDWFV

SEQ ID NO: 189 - protein, 40 aa, Artificial Sequence
  Description of Artificial Sequence: Synthetic peptide
YRGQAGSGVGSLTVAGKVASDPPARIGQKVFADNFYDWFV

SEQ ID NO: 190 - protein, 39 aa, Artificial Sequence
  Description of Artificial Sequence: Synthetic peptide
HRGMLVLGRISEGAGNVDPEPPARIGQNVFAGNFYDWFV

SEQ ID NO: 191 - protein, 39 aa, Artificial Sequence
  Description of Artificial Sequence: Synthetic peptide
QRGMPVLGRISDGAGKVGSEPPARIARKVFPVNFYDWFI

SEQ ID NO: 192 - protein, 39 aa, Artificial Sequence
  Description of Artificial Sequence: Synthetic peptide
QGGLLVTGRISDGAGKVASEPPGGIGQKVFAGNFYDWFV

SEQ ID NO: 193 - protein, 39 aa, Artificial Sequence
  Description of Artificial Sequence: Synthetic peptide
YPWYGGSGTYLDGAGKVASEPPARIDQQVFAGNFYDWFV

SEQ ID NO: 194 - protein, 39 aa, Artificial Sequence
  Description of Artificial Sequence: Synthetic peptide
YRAMLVLRRISDVAGIVDSEPPTRIGQKVFAGNFYDWFV

SEQ ID NO: 195 - protein, 39 aa, Artificial Sequence
  Description of Artificial Sequence: Synthetic peptide
YRGMLVLGRISQGAGNVASEPSSRIGQKVFAGNFYDWFI

SEQ ID NO: 196 - protein, 39 aa, Artificial Sequence
  Description of Artificial Sequence: Synthetic peptide
YRGMLVLGRISDGAGKVDYEPPARIGQKVFAGNFYDWFV

SEQ ID NO: 197 - protein, 39 aa, Artificial Sequence
  Description of Artificial Sequence: Synthetic peptide
YRGMLGLGGISAGAGIVASEPPARVGQKVFAGNFYDWFV

SEQ ID NO: 198 - protein, 39 aa, Artificial Sequence
  Description of Artificial Sequence: Synthetic peptide
YRGILFQGRIPDGAGKVASEPPTRIGERVFAVNFYDWFV

SEQ ID NO: 199 - protein, 39 aa, Artificial Sequence
  Description of Artificial Sequence: Synthetic peptide
QGGMPVLGRISDGAGKVAFEPPARIGQKVFAGNFYDWFV

SEQ ID NO: 200 - protein, 39 aa, Artificial Sequence
  Description of Artificial Sequence: Synthetic peptide
YRGMLVLGRIQDGAGKVASEPPARIGQKVFTGNFYDWFV

SEQ ID NO: 201 - protein, 39 aa, Artificial Sequence
  Description of Artificial Sequence: Synthetic peptide
QRGMLVLGGVSDGAGKVASDPPASIGQNVFAVNFYDWFV

SEQ ID NO: 202 - protein, 39 aa, Artificial Sequence
  Description of Artificial Sequence: Synthetic peptide
YPGMLILDRISDGASKVVSEPPASIGQKVFAVNFYDWFV

SEQ ID NO: 203 - protein, 39 aa, Artificial Sequence
  Description of Artificial Sequence: Synthetic peptide
YRGMLVLDRISDGAGKVASEQPARIGQEVYAVNFYDWFV

SEQ ID NO: 204 - protein, 39 aa, Artificial Sequence
  Description of Artificial Sequence: Synthetic peptide
YRGMLDLGRISGGVGKVASESPARIGQKVYAVNFYDWFV

SEQ ID NO: 205 - protein, 32 aa, Artificial Sequence
  Description of Artificial Sequence: Synthetic peptide
QRGMMVLGRISDGAGEVASEKVFAVNFYDWFV

SEQ ID NO: 206 - protein, 39 aa, Artificial Sequence
  Description of Artificial Sequence: Synthetic peptide
QRGMLVLGRVSDGAGKVDSAPPARIGQKVFAGNFYDWFV

SEQ ID NO: 207 - protein, 39 aa, Artificial Sequence
  Description of Artificial Sequence: Synthetic peptide
QRGMLVLGRMSDGAGKVAFEPPARIGQRGFAGNFYDWFV

SEQ ID NO: 208 - protein, 39 aa, Artificial Sequence
  Description of Artificial Sequence: Synthetic peptide
QRGTLVLGRISDGAGKAASEPPARIGQNVFAVNFYDWFV

SEQ ID NO: 209 - protein, 39 aa, Artificial Sequence
  Description of Artificial Sequence: Synthetic peptide
QRGMLVLDRISDGAGKVAAEPPARIGQKVFALNFYDWFI

SEQ ID NO: 210 - protein, 39 aa, Artificial Sequence
  Description of Artificial Sequence: Synthetic peptide
QRGMLVLGRISDGAGEVASEPPARIGEKVYAVNFYDWFV

SEQ ID NO: 211 - protein, 39 aa, Artificial Sequence
  Description of Artificial Sequence: Synthetic peptide
QRGILVRGRISDGAGKVGSEPPARSGEKVFAVNFYDWFI

SEQ ID NO: 212 - protein, 39 aa, Artificial Sequence
  Description of Artificial Sequence: Synthetic peptide
QLGMVVLGRISDGSGKAASEPAARISQKVFAVNFYDWFV

SEQ ID NO: 213 - protein, 39 aa, Artificial Sequence
  Description of Artificial Sequence: Synthetic peptide
QRGMLVLGRISDGDGKVASEPPARIGQRVFAVNFYDWFV

SEQ ID NO: 214 - protein, 39 aa, Artificial Sequence
  Description of Artificial Sequence: Synthetic peptide
YRGMLVLGRSSDGAGKVAFERPARIGQTVFAVNFYDWFV

SEQ ID NO: 215 - protein, 39 aa, Artificial Sequence
  Description of Artificial Sequence: Synthetic peptide
  MOD_RES (16): Unknown amino acid; translation read-through at TAA stop codon
YRGMLVLGRISDGAGXVASEPPARIGRKVFAVNFYDWFV

SEQ ID NO: 216 - protein, 39 aa, Artificial Sequence
  Description of Artificial Sequence: Synthetic peptide
YRGMLVLGRISGGAGKAASERPARIGQKVSAVNFYDWFV

SEQ ID NO: 217 - protein, 39 aa, Artificial Sequence
  Description of Artificial Sequence: Synthetic peptide
YRGMMVQGRISDGAGKVASVSPVRIGQKVIAVNFYDWFV

SEQ ID NO: 218 - protein, 39 aa, Artificial Sequence
  Description of Artificial Sequence: Synthetic peptide
YRGRLGLGRISDVAGKVACDPSARIGQKVLPVNFYDWFV

SEQ ID NO: 219 - protein, 39 aa, Artificial Sequence
  Description of Artificial Sequence: Synthetic peptide
YRGMLVLGRISDGAGRVASEPQARIGQKVFAVNFYDWFV

SEQ ID NO: 220 - protein, 39 aa, Artificial Sequence
  Description of Artificial Sequence: Synthetic peptide
QGGMLVPGRISDGAGKVASQPPARIGPKGFAGNFYDWFV

SEQ ID NO: 221 - protein, 39 aa, Artificial Sequence
  Description of Artificial Sequence: Synthetic peptide
YRGMRVLGRISDGAGKVASEPPTHIGQKVFPVNFYDWFV

SEQ ID NO: 222 - protein, 39 aa, Artificial Sequence
  Description of Artificial Sequence: Synthetic peptide
YRGMLVLGRISDGAGKVGSEPAARIGQKVFALNFYDWFV

SEQ ID NO: 223 - protein, 40 aa, Artificial Sequence
  Description of Artificial Sequence: Synthetic peptide
YRGQGMVLGRISDGAGKVASEPPGRIGQKVFPVNFYDWFV

SEQ ID NO: 224 - protein, 39 aa, Artificial Sequence
  Description of Artificial Sequence: Synthetic peptide
YRGMLGLGRITGGAGKVASEPPDRIGQHVFVDNFYDWFV

SEQ ID NO: 225 - protein, 38 aa, Artificial Sequence
  Description of Artificial Sequence: Synthetic peptide
DGMLVLGRISDGAGNVASEAPARIGQKVFAVNFYDWFV

SEQ ID NO: 226 - protein, 39 aa, Artificial Sequence
  Description of Artificial Sequence: Synthetic peptide
YRGMRVRGRISDGAGKAASDPRARIGQTVLDVNFYDWFV

SEQ ID NO: 227 - protein, 39 aa, Artificial Sequence
  Description of Artificial Sequence: Synthetic peptide
YRGMWVLGRISYGAGKVAYEPPARMGQKGFAVNFYDWFV

SEQ ID NO: 228 - protein, 39 aa, Artificial Sequence
  Description of Artificial Sequence: Synthetic peptide
YRGMLVGGRIAGGAGIVASEPPARIGQKVFAVNFYDWFV

SEQ ID NO: 229 - protein, 39 aa, Artificial Sequence
  Description of Artificial Sequence: Synthetic peptide
YRGLLGLGGISDGAGKVASEPPARNGQKVFAVNFYDWFV

SEQ ID NO: 230 - protein, 39 aa, Artificial Sequence
  Description of Artificial Sequence: Synthetic peptide
YRGMLGLGRISAGAGKVASGAPARIGQEDFAVNFYDWFV

SEQ ID NO: 231 - protein, 39 aa, Artificial Sequence
  Description of Artificial Sequence: Synthetic peptide
YRGMLALGRISEGAGKVASEPPARIGQNVFAVNFYDWFV

SEQ ID NO: 232 - protein, 39 aa, Artificial Sequence
  Description of Artificial Sequence: Synthetic peptide
YRGMLVLGRISDGAGKVASEPPARIGQKVLAVNFYDWFV

SEQ ID NO: 233 - protein, 39 aa, Artificial Sequence
  Description of Artificial Sequence: Synthetic peptide
YPGMLVPGRISDGAGEGATDPPPRIGQKVFAFNFYDWFV

SEQ ID NO: 234 - protein, 39 aa, Artificial Sequence
  Description of Artificial Sequence: Synthetic peptide
YRGMLVPGRISDGAGKVAYEPPARIGQKIFAVNFYDWFV

SEQ ID NO: 235 - protein, 39 aa, Artificial Sequence
  Description of Artificial Sequence: Synthetic peptide
YRGVLVLGRVSDGVGKVASEPPAHRGQRVFGVNFYDWFV

SEQ ID NO: 236 - protein, 39 aa, Artificial Sequence
  Description of Artificial Sequence: Synthetic peptide
YRRMLVLGRISDGAANVASGPPDRIGQKVFAGNFYDWFV

SEQ ID NO: 237 - protein, 39 aa, Artificial Sequence
  Description of Artificial Sequence: Synthetic peptide
YRRMLALGRFSDVTGDVASEPPAHIGQKVVAVNFYDWFV

SEQ ID NO: 238 - protein, 39 aa, Artificial Sequence
  Description of Artificial Sequence: Synthetic peptide
YRGMVVRGRIFDGPGKVASEPRARIGQKVFAVNFYDWFV

SEQ ID NO: 239 - protein, 39 aa, Artificial Sequence
  Description of Artificial Sequence: Synthetic peptide
YRGMLILGRISDGAGKVASEPPARVGQDVVAVNFYDWFV

SEQ ID NO: 240 - protein, 39 aa, Artificial Sequence
  Description of Artificial Sequence: Synthetic peptide
YPGRLVGGRISDGVGKVASEPPGRIGQKVFAVNFYDWFV

SEQ ID NO: 241 - protein, 39 aa, Artificial Sequence
  Description of Artificial Sequence: Synthetic peptide
QRGLLVLGRIFDGAGKVASDPPARIGQKDFADNFYDWFV

SEQ ID NO: 242 - protein, 39 aa, Artificial Sequence
  Description of Artificial Sequence: Synthetic peptide
YRGMLVLGRISDGAGKVAFEPPARIGQNVFAVNFYDWFV

SEQ ID NO: 243 - protein, 39 aa, Artificial Sequence
  Description of Artificial Sequence: Synthetic peptide
  MOD_RES (16): Unknown amino acid; translation read-through at TAA stop codon
YRCMPVLGRISDGAGXVASDRPARIGQKVFAVNFYDWFV

SEQ ID NO: 244 - protein, 39 aa, Artificial Sequence
  Description of Artificial Sequence: Synthetic peptide
YRGRLVLGRISDGAGKVAAEPPASMDSKVFAGNFYDWFV

SEQ ID NO: 245 - protein, 16 aa, Artificial Sequence
  Description of Artificial Sequence: Synthetic peptide
GFREGNFYDWFVAQVT

SEQ ID NO: 246 - protein, 16 aa, Artificial Sequence
  Description of Artificial Sequence: Synthetic peptide
GFREGQRWYWFVAQVT

SEQ ID NO: 247 - protein, 16 aa, Artificial Sequence
  Description of Artificial Sequence: Synthetic peptide
GFREGYFYDWFLAQVT

SEQ ID NO: 248 - protein, 16 aa, Artificial Sequence
  Description of Artificial Sequence: Synthetic peptide
GFREGDFYEWFVAQVT

SEQ ID NO: 249 - protein, 16 aa, Artificial Sequence
  Description of Artificial Sequence: Synthetic peptide
GFREGQFYEWFAAQVT

SEQ ID NO: 250 - protein, 16 aa, Artificial Sequence
  Description of Artificial Sequence: Synthetic peptide
GFREGTFYDWFVAQVT

SEQ ID NO: 251 - protein, 16 aa, Artificial Sequence
  Description of Artificial Sequence: Synthetic peptide
GFREGNFYDWFEAQVT

SEQ ID NO: 252 - protein, 16 aa, Artificial Sequence
  Description of Artificial Sequence: Synthetic peptide
GFREGAFYDWFEAQVT

SEQ ID NO: 253 - protein, 16 aa, Artificial Sequence
  Description of Artificial Sequence: Synthetic peptide
GFREGAFYDWFVAQVT

SEQ ID NO: 254 - protein, 16 aa, Artificial Sequence
  Description of Artificial Sequence: Synthetic peptide
GFREGKFYQWFEAQVT

SEQ ID NO: 255 - protein, 16 aa, Artificial Sequence
  Description of Artificial Sequence: Synthetic peptide
GFREGDFYDWFQAQVT

SEQ ID NO: 256 - protein, 16 aa, Artificial Sequence
  Description of Artificial Sequence: Synthetic peptide
GFREGTFYEWFVAQVT

SEQ ID NO: 257 - protein, 16 aa, Artificial Sequence
  Description of Artificial Sequence: Synthetic peptide
GFREGNFYDWFVAQVT

SEQ ID NO: 258 - protein, 16 aa, Artificial Sequence
  Description of Artificial Sequence: Synthetic peptide
GFREGQFYEWFLAQVT

SEQ ID NO: 259 - protein, 16 aa, Artificial Sequence
  Description of Artificial Sequence: Synthetic peptide
GFREGQFYDWFLAQVT

SEQ ID NO: 260 - protein, 16 aa, Artificial Sequence
  Description of Artificial Sequence: Synthetic peptide
GFREGEFYDWFQAQVT

SEQ ID NO: 261 - protein, 16 aa, Artificial Sequence
  Description of Artificial Sequence: Synthetic peptide
GFREGQFYDWFRAQVT

SEQ ID NO: 262 - protein, 16 aa, Artificial Sequence
  Description of Artificial Sequence: Synthetic peptide
GFREGYFYEWFQAQVT

SEQ ID NO: 263 - protein, 16 aa, Artificial Sequence
  Description of Artificial Sequence: Synthetic peptide
GFREGDFYQWFEAQVT

SEQ ID NO: 264 - protein, 16 aa, Artificial Sequence
  Description of Artificial Sequence: Synthetic peptide
GFREGSFYGWFQAQVT

SEQ ID NO: 265 - protein, 16 aa, Artificial Sequence
  Description of Artificial Sequence: Synthetic peptide
GFREGSFYAWFQAQVT

SEQ ID NO: 266 - protein, 16 aa, Artificial Sequence
  Description of Artificial Sequence: Synthetic peptide
GFREGQFYDWFVAQVT

SEQ ID NO: 267 - protein, 16 aa, Artificial Sequence
  Description of Artificial Sequence: Synthetic peptide
GFREGIFYEWFVAQVT

SEQ ID NO: 268 - protein, 16 aa, Artificial Sequence
  Description of Artificial Sequence: Synthetic peptide
GFREGSFYEWFQAQVT

SEQ ID NO: 269 - protein, 16 aa, Artificial Sequence
  Description of Artificial Sequence: Synthetic peptide
GFREGNFYDWFAAQVT

SEQ ID NO: 270 - protein, 16 aa, Artificial Sequence
  Description of Artificial Sequence: Synthetic peptide
GFREGSFYDWFVAQVT

SEQ ID NO: 271 - protein, 16 aa, Artificial Sequence
  Description of Artificial Sequence: Synthetic peptide
GFREGDFYDWFVAQVT

SEQ ID NO: 272 - protein, 16 aa, Artificial Sequence
  Description of Artificial Sequence: Synthetic peptide
GFREGDFYQWFVAQVT

SEQ ID NO: 273 - protein, 16 aa, Artificial Sequence
  Description of Artificial Sequence: Synthetic peptide
GFREGGFYDWFVAQVT

SEQ ID NO: 274 - protein, 16 aa, Artificial Sequence
  Description of Artificial Sequence: Synthetic peptide
GFREGDFYGWFQAQVT

SEQ ID NO: 275 - protein, 16 aa, Artificial Sequence
  Description of Artificial Sequence: Synthetic peptide
GFREGVFYDWFVAQVT

SEQ ID NO: 276 - protein, 16 aa, Artificial Sequence
  Description of Artificial Sequence: Synthetic peptide
GFREGGFYEWFQAQVT

SEQ ID NO: 277 - protein, 16 aa, Artificial Sequence
  Description of Artificial Sequence: Synthetic peptide
GFREGSFYDWFQAQVT

SEQ ID NO: 278 - protein, 16 aa, Artificial Sequence
  Description of Artificial Sequence: Synthetic peptide
GFREGNFYEWFQAQVT

SEQ ID NO: 279 - protein, 16 aa, Artificial Sequence
  Description of Artificial Sequence: Synthetic peptide
GFREGKFYDWFLAQVT

SEQ ID NO: 280 - protein, 16 aa, Artificial Sequence
  Description of Artificial Sequence: Synthetic peptide
GFREGEFYEWFVAQVT

SEQ ID NO: 281 - protein, 16 aa, Artificial Sequence
  Description of Artificial Sequence: Synthetic peptide
GFREGRFYDWFVAQVT

SEQ ID NO: 282 - protein, 16 aa, Artificial Sequence
  Description of Artificial Sequence: Synthetic peptide
GFREGTFYDWFVAQVT

SEQ ID NO: 283 - protein, 16 aa, Artificial Sequence
  Description of Artificial Sequence: Synthetic peptide
GFREGEFYEWFAAQVT

SEQ ID NO: 284 - protein, 16 aa, Artificial Sequence
  Description of Artificial Sequence: Synthetic peptide
GFREGDFYEWFEAQVT

SEQ ID NO: 285 - protein, 16 aa, Artificial Sequence
  Description of Artificial Sequence: Synthetic peptide
  MOD_RES (12): Unknown amino acid
GFREGHFYDWFXAQVT

SEQ ID NO: 286 - protein, 16 aa, Artificial Sequence
  Description of Artificial Sequence: Synthetic peptide
GFREGEFYDWFVAQVT

SEQ ID NO: 287 - protein, 16 aa, Artificial Sequence
  Description of Artificial Sequence: Synthetic peptide
GFREGSFYDWFVAQVT

SEQ ID NO: 288 - protein, 16 aa, Artificial Sequence
  Description of Artificial Sequence: Synthetic peptide
GFREGSFYDWFGAQVT

SEQ ID NO: 289 - protein, 16 aa, Artificial Sequence
  Description of Artificial Sequence: Synthetic peptide
GFREGTFYDWFQAQVT

SEQ ID NO: 290 - protein, 16 aa, Artificial Sequence
  Description of Artificial Sequence: Synthetic peptide
GFREGNFYEWFTAQVT

SEQ ID NO: 291 - protein, 16 aa, Artificial Sequence
  Description of Artificial Sequence: Synthetic peptide
GFREGSFYNWFQAQVT

SEQ ID NO: 292 - protein, 16 aa, Artificial Sequence
  Description of Artificial Sequence: Synthetic peptide
GFREGNFYDWFVAQVT

SEQ ID NO: 293 - protein, 16 aa, Artificial Sequence
  Description of Artificial Sequence: Synthetic peptide
GFREGDFYDWFVAQVT

SEQ ID NO: 294 - protein, 16 aa, Artificial Sequence
  Description of Artificial Sequence: Synthetic peptide
GFREGAFYDWFAAQVT

SEQ ID NO: 295 - protein, 16 aa, Artificial Sequence
  Description of Artificial Sequence: Synthetic peptide
GFREGSFYDWFEAQVT

SEQ ID NO: 296 - protein, 16 aa, Artificial Sequence
  Description of Artificial Sequence: Synthetic peptide
GFREGSFYDWFAAQVT

SEQ ID NO: 297 - protein, 16 aa, Artificial Sequence
  Description of Artificial Sequence: Synthetic peptide
GFREGSFYEWFDAQVT

SEQ ID NO: 298 - protein, 16 aa, Artificial Sequence
  Description of Artificial Sequence: Synthetic peptide
GFREGAFYDWFEAQVT

SEQ ID NO: 299 - protein, 16 aa, Artificial Sequence
  Description of Artificial Sequence: Synthetic peptide
GFREGQFYDWFAAQVT

SEQ ID NO: 300 - protein, 16 aa, Artificial Sequence
  Description of Artificial Sequence: Synthetic peptide
GFREGNFYDWFAAQVT

SEQ ID NO: 301 - protein, 16 aa, Artificial Sequence
  Description of Artificial Sequence: Synthetic peptide
GFREGDFYDWFAAQVT

SEQ ID NO: 302 - protein, 16 aa, Artificial Sequence
  Description of Artificial Sequence: Synthetic peptide
GFREGSFYEWFEAQVT

SEQ ID NO: 303 - protein, 16 aa, Artificial Sequence
  Description of Artificial Sequence: Synthetic peptide
GFREGGFYDWFLAQVT

SEQ ID NO: 304 - protein, 16 aa, Artificial Sequence
  Description of Artificial Sequence: Synthetic peptide
GFREGGFYAWFAAQVT

SEQ ID NO: 305 - protein, 16 aa, Artificial Sequence
  Description of Artificial Sequence: Synthetic peptide
  MOD_RES (12): Unknown amino acid
GFREGGFYEWFXAQVT

SEQ ID NO: 306 - protein, 16 aa, Artificial Sequence
  Description of Artificial Sequence: Synthetic peptide
GFREGDFYDWFRAQVT

SEQ ID NO: 307 - protein, 16 aa, Artificial Sequence
  Description of Artificial Sequence: Synthetic peptide
GFREGSFYDWFVAQVT

SEQ ID NO: 308 - protein, 16 aa, Artificial Sequence
  Description of Artificial Sequence: Synthetic peptide
GFREGDFYGWFQAQVT

SEQ ID NO: 309 - protein, 16 aa, Artificial Sequence
  Description of Artificial Sequence: Synthetic peptide
GFREGGFYDWFQAQVT

SEQ ID NO: 310 - protein, 16 aa, Artificial Sequence
  Description of Artificial Sequence: Synthetic peptide
GFREGDFYDWFVAQVT

SEQ ID NO: 311 - protein, 16 aa, Artificial Sequence
  Description of Artificial Sequence: Synthetic peptide
GFREGDFYDWFQAQVT

SEQ ID NO: 312 - protein, 16 aa, Artificial Sequence
  Description of Artificial Sequence: Synthetic peptide
GFREGGFYDWFVAQVT

SEQ ID NO: 313 - protein, 16 aa, Artificial Sequence
  Description of Artificial Sequence: Synthetic peptide
GFREGDFYDWFAAQVT

SEQ ID NO: 314 - protein, 16 aa, Artificial Sequence
  Description of Artificial Sequence: Synthetic peptide
GFREGNFYDWFQAQVT

SEQ ID NO: 315 - protein, 16 aa, Artificial Sequence
  Description of Artificial Sequence: Synthetic peptide
GFREGNFYDWFLAQVT

SEQ ID NO: 316 - protein, 16 aa, Artificial Sequence
  Description of Artificial Sequence: Synthetic peptide
GFREGHFYDWFQAQVT

SEQ ID NO: 317 - protein, 16 aa, Artificial Sequence
  Description of Artificial Sequence: Synthetic peptide
GFREGQFYEWFEAQVT

SEQ ID NO: 318 - protein, 16 aa, Artificial Sequence
  Description of Artificial Sequence: Synthetic peptide
GFREGSFYEWFQAQVT

SEQ ID NO: 319 - protein, 16 aa, Artificial Sequence
  Description of Artificial Sequence: Synthetic peptide
GFREGDFYDWFLAQVT

SEQ ID NO: 320 - protein, 16 aa, Artificial Sequence
  Description of Artificial Sequence: Synthetic peptide
GFREGHFYDWFVAQVT

SEQ ID NO: 321 - protein, 16 aa, Artificial Sequence
  Description of Artificial Sequence: Synthetic peptide
GFREGQFYEWFVAQVT

SEQ ID NO: 322 - protein, 16 aa, Artificial Sequence
  Description of Artificial Sequence: Synthetic peptide
GFREGQFYDWFAAQVT

SEQ ID NO: 323 - protein, 16 aa, Artificial Sequence
  Description of Artificial Sequence: Synthetic peptide
GFREGQFYDWFVAQVT

SEQ ID NO: 324 - protein, 16 aa, Artificial Sequence
  Description of Artificial Sequence: Synthetic peptide
GFREGDFYQWFAAQVT

SEQ ID NO: 325 - protein, 16 aa, Artificial Sequence
  Description of Artificial Sequence: Synthetic peptide
GFREGNFYDWFVAQVT

SEQ ID NO: 326 - protein, 16 aa, Artificial Sequence
  Description of Artificial Sequence: Synthetic peptide
GFRDGSFYDWFVAQVT

SEQ ID NO: 327 - protein, 16 aa, Artificial Sequence
  Description of Artificial Sequence: Synthetic peptide
GFREGHFYEWFQAQVT

SEQ ID NO: 328 - protein, 16 aa, Artificial Sequence
  Description of Artificial Sequence: Synthetic peptide
GFREGDFYDWFSAQVT

SEQ ID NO: 329 - protein, 16 aa, Artificial Sequence
  Description of Artificial Sequence: Synthetic peptide
GFREGHFYDWFDAQVT

SEQ ID NO: 330 - protein, 16 aa, Artificial Sequence
  Description of Artificial Sequence: Synthetic peptide
GFREGYFYDWFKAQVT

SEQ ID NO: 331 - protein, 16 aa, Artificial Sequence
  Description of Artificial Sequence: Synthetic peptide
GFREGHFYDWFEAQVT

SEQ ID NO: 332 - protein, 16 aa, Artificial Sequence
  Description of Artificial Sequence: Synthetic peptide
GFREGDFYDWFEAQVT

SEQ ID NO: 333 - protein, 16 aa, Artificial Sequence
  Description of Artificial Sequence: Synthetic peptide
GFREGTFYDWFVAQVT

SEQ ID NO: 334 - protein, 16 aa, Artificial Sequence
  Description of Artificial Sequence: Synthetic peptide
GFREGDYYGWFEAQVT

SEQ ID NO: 335 - protein, 16 aa, Artificial Sequence
  Description of Artificial Sequence: Synthetic peptide
GFREGDFYAWFMAQVT

SEQ ID NO: 336 - protein, 16 aa, Artificial Sequence
  Description of Artificial Sequence: Synthetic peptide
GFREGNFYEWFLAQVT

SEQ ID NO: 337 - protein, 16 aa, Artificial Sequence
  Description of Artificial Sequence: Synthetic peptide
GFREGSFYDWFDAQVT

SEQ ID NO: 338 - protein, 16 aa, Artificial Sequence
  Description of Artificial Sequence: Synthetic peptide
GFREGNFYDQFVAQVT

SEQ ID NO: 339 - protein, 16 aa, Artificial Sequence
  Description of Artificial Sequence: Synthetic peptide
GFREGHFYEWFAAQVT

SEQ ID NO: 340 - protein, 16 aa, Artificial Sequence
  Description of Artificial Sequence: Synthetic peptide
GFREGNFYEWFVAQVT

SEQ ID NO: 341 - protein, 16 aa, Artificial Sequence
  Description of Artificial Sequence: Synthetic peptide
GFREGKFYDWFVAQVT

SEQ ID NO: 342 - protein, 16 aa, Artificial Sequence
  Description of Artificial Sequence: Synthetic peptide
GFREGMFDVQLLAQVT

SEQ ID NO: 343 - protein, 26 aa, Artificial Sequence
  Description of Artificial Sequence: Synthetic peptide
  MOD_RES (1)..(6): Variable amino acid
  MOD_RES (21)..(26): Variable amino acid
XXXXXXFHENFYDWFVRQVSXXXXXX

SEQ ID NO: 344 - protein, 21 aa, Artificial Sequence
  Description of Artificial Sequence: Synthetic peptide
VTFTSAVFHENFYDWFVRQVS

SEQ ID NO: 345 - protein, 26 aa, Artificial Sequence
  Description of Artificial Sequence: Synthetic peptide
TYKARFLHENFYDWFNRQVSQYFGRV

SEQ ID NO: 346 - protein, 24 aa, Artificial Sequence
  Description of Artificial Sequence: Synthetic peptide
QRLSLHEQFYDWFVGQVSPLGAGG

SEQ ID NO: 347 - protein, 26 aa, Artificial Sequence
  Description of Artificial Sequence: Synthetic peptide
GGGKVNFHEDFYGWFVQQFSGVGSDR

SEQ ID NO: 348 - protein, 26 aa, Artificial Sequence
  Description of Artificial Sequence: Synthetic peptide
LVGDAPFHEDFYDWFARQVFGCCQEQ

SEQ ID NO: 349 - protein, 26 aa, Artificial Sequence
  Description of Artificial Sequence: Synthetic peptide
TGAEVSFHENFYDWFDRQYSSWLDRD

SEQ ID NO: 350 - protein, 26 aa, Artificial Sequence
  Description of Artificial Sequence: Synthetic peptide
QPHSSRLHESFYDWFDRQVPWYALDR

SEQ ID NO: 351 - protein, 26 aa, Artificial Sequence
  Description of Artificial Sequence: Synthetic peptide
SRALAAVHEQFYDWFVRQVSGLDWGY

SEQ ID NO: 352 - protein, 26 aa, Artificial Sequence
  Description of Artificial Sequence: Synthetic peptide
QPKDGTLHENFYDWFVRQVSSSGWVG

SEQ ID NO: 353 - protein, 26 aa, Artificial Sequence
  Description of Artificial Sequence: Synthetic peptide
RGRLIQLHEDFYDWFLRQVSGMGGGS

SEQ ID NO: 354 - protein, 26 aa, Artificial Sequence
  Description of Artificial Sequence: Synthetic peptide
QRGAPKSDENFYDWFVRQVLRFGEND

SEQ ID NO: 355 - protein, 26 aa, Artificial Sequence
  Description of Artificial Sequence: Synthetic peptide
AARTSLFHEDFYEWFDRQVRQEGMWG

SEQ ID NO: 356 - protein, 26 aa, Artificial Sequence
  Description of Artificial Sequence: Synthetic peptide
GTSNHSLHENFYDWFVRQLSSVQSSG

SEQ ID NO: 357 - protein, 26 aa, Artificial Sequence
  Description of Artificial Sequence: Synthetic peptide
VSHVHLFHENFYDWFVRQLAAEGFSG

SEQ ID NO: 358 - protein, 26 aa, Artificial Sequence
  Description of Artificial Sequence: Synthetic peptide
GRQDSGLHEHFYDWFSRQVQGEVALG

SEQ ID NO: 359 - protein, 26 aa, Artificial Sequence
  Description of Artificial Sequence: Synthetic peptide
SNDERQFHETFYDWFVRQVSADGADR

SEQ ID NO: 360 - protein, 26 aa, Artificial Sequence
  Description of Artificial Sequence: Synthetic peptide
LSTEQRFHEKFYDWFVHQVSTSGGGT

SEQ ID NO: 361 - protein, 26 aa, Artificial Sequence
  Description of Artificial Sequence: Synthetic peptide
SLSREQFHENFYDWFARQVSELEGVV

SEQ ID NO: 362 - protein, 26 aa, Artificial Sequence
  Description of Artificial Sequence: Synthetic peptide
IPGRRSLHENFYDWFVRQVSPGGGSA

SEQ ID NO: 363 - protein, 26 aa, Artificial Sequence
  Description of Artificial Sequence: Synthetic peptide
TQKAQSLDEKFYDWFVRQVSGGGLTG

SEQ ID NO: 364 - protein, 26 aa, Artificial Sequence
  Description of Artificial Sequence: Synthetic peptide
VSQLSDFHENFYGWFARQIAGQAEWT

SEQ ID NO: 365 - protein, 26 aa, Artificial Sequence
  Description of Artificial Sequence: Synthetic peptide
NGTSQALHQNFYDWFAQQISGSEPGP

SEQ ID NO: 366 - protein, 26 aa, Artificial Sequence
  Description of Artificial Sequence: Synthetic peptide
VGQSVTFHGDFYDWFDRQLSGSQEFG

SEQ ID NO: 367 - protein, 26 aa, Artificial Sequence
  Description of Artificial Sequence: Synthetic peptide
TIDHHPLHEQFYDWFARQVSDLESLG

SEQ ID NO: 368 - protein, 26 aa, Artificial Sequence
  Description of Artificial Sequence: Synthetic peptide
PNVGYAFHENFYDWFIRQVSIEEKAG

SEQ ID NO: 369 - protein, 26 aa, Artificial Sequence
  Description of Artificial Sequence: Synthetic peptide
SRGSGVFHESFYNWFDRQVSEWIQFG

SEQ ID NO: 370 - protein, 26 aa, Artificial Sequence
  Description of Artificial Sequence: Synthetic peptide
QPVSGSVHERFYDWFVRQVSGSAGGG

SEQ ID NO: 371 - protein, 26 aa, Artificial Sequence
  Description of Artificial Sequence: Synthetic peptide
ASQLPPVYENFYEWFDRQVSLDAQRE

SEQ ID NO: 372 - protein, 26 aa, Artificial Sequence
  Description of Artificial Sequence: Synthetic peptide
VSGRGAFHENFYDWFVRQVFRDEQDT

SEQ ID NO: 373 - protein, 26 aa, Artificial Sequence
  Description of Artificial Sequence: Synthetic peptide
ARPPPTVHENFYDWFVRQVSETWRQD

SEQ ID NO: 374 - protein, 26 aa, Artificial Sequence
  Description of Artificial Sequence: Synthetic peptide
QGGDRLFHERFYDWFDRLVSSDSTGE

SEQ ID NO: 375 - protein, 26 aa, Artificial Sequence
  Description of Artificial Sequence: Synthetic peptide
QHIAAGLHENFYDWFIRQVSGVNVPA

SEQ ID NO: 376 - protein, 26 aa, Artificial Sequence
  Description of Artificial Sequence: Synthetic peptide
QPNDGLLHENFYDWFVRQVSNAVDGG

SEQ ID NO: 377 - protein, 26 aa, Artificial Sequence
  Description of Artificial Sequence: Synthetic peptide
PVEFTVYHDNFYDWFARQVSDGLGQF

SEQ ID NO: 378 - protein, 26 aa, Artificial Sequence
  Description of Artificial Sequence: Synthetic peptide
FCVQASIHENFYDWFVRQVAENQVFS

SEQ ID NO: 379 - protein, 26 aa, Artificial Sequence
  Description of Artificial Sequence: Synthetic peptide
GRPRGSFHENFYDWFARQVSGDGAGT

SEQ ID NO: 380 - protein, 26 aa, Artificial Sequence
  Description of Artificial Sequence: Synthetic peptide
IVGASLCHESFYDWFACQVTNLQSQG

SEQ ID NO: 381 - protein, 26 aa, Artificial Sequence
  Description of Artificial Sequence: Synthetic peptide
IGLRQMFHENFYDWFAREVSKEAGDG

SEQ ID NO: 382 - protein, 26 aa, Artificial Sequence
  Description of Artificial Sequence: Synthetic peptide
LGGAIEGHGNFYDWFVRQVSLDVGGE

SEQ ID NO: 383 - protein, 26 aa, Artificial Sequence
  Description of Artificial Sequence: Synthetic peptide
LNALQQLHENFYDWFGRQVSATPPGG

SEQ ID NO: 384 - protein, 26 aa, Artificial Sequence
  Description of Artificial Sequence: Synthetic peptide
VGNCDTFPENFYDWFACQVSELGGMN

SEQ ID NO: 385 - protein, 26 aa, Artificial Sequence
  Description of Artificial Sequence: Synthetic peptide
FSQDGNFHENFYDWFDRQLSLVGAGT

SEQ ID NO: 386 - protein, 26 aa, Artificial Sequence
  Description of Artificial Sequence: Synthetic peptide
PAGNRALHESFYDWFVRQVSEFQLGA

SEQ ID NO: 387 - protein, 26 aa, Artificial Sequence
  Description of Artificial Sequence: Synthetic peptide
DRLRARFNENFYDWFDRQVSGQGSMP

SEQ ID NO: 388 - protein, 26 aa, Artificial Sequence
  Description of Artificial Sequence: Synthetic peptide
VLGVAQFHDKFYDWFARQVSQLESAG

SEQ ID NO: 389 - protein, 26 aa, Artificial Sequence
  Description of Artificial Sequence: Synthetic peptide
GVVGGAFHEQFYDWFDRQVSAAFKGD

SEQ ID NO: 390 - protein, 26 aa, Artificial Sequence
  Description of Artificial Sequence: Synthetic peptide
DESEMRLHEQFYDWFARLVSLEGGSA

SEQ ID NO: 391 - protein, 26 aa, Artificial Sequence
  Description of Artificial Sequence: Synthetic peptide
EGGGVAIHENFYDWFDRQVSLQGWSD

SEQ ID NO: 392 - protein, 26 aa, Artificial Sequence
  Description of Artificial Sequence: Synthetic peptide
SRIVSRFHENFYDWFVRQVSGDAPVQ

SEQ ID NO: 393 - protein, 26 aa, Artificial Sequence
  Description of Artificial Sequence: Synthetic peptide
IPAGAQLHENFYDWFARQVSGEDGGA

SEQ ID NO: 394 - protein, 26 aa, Artificial Sequence
  Description of Artificial Sequence: Synthetic peptide
GSSAAGFDEQFYDWFDRQVSEAFRDG

SEQ ID NO: 395 - protein, 26 aa, Artificial Sequence
  Description of Artificial Sequence: Synthetic peptide
RLALRTFHQDFYDWFVRQVAAEDTDP

SEQ ID NO: 396 - protein, 26 aa, Artificial Sequence
  Description of Artificial Sequence: Synthetic peptide
QGSFAVLHENFYDWFARQVSGVEGLA

SEQ ID NO: 397 - protein, 26 aa, Artificial Sequence
  Description of Artificial Sequence: Synthetic peptide
QGNMSALHENFYDWFVRQVSEADRVD

SEQ ID NO: 398 - protein, 26 aa, Artificial Sequence
  Description of Artificial Sequence: Synthetic peptide
VAYPALLHEQFYDWFVRQVSAVAGTT

SEQ ID NO: 399 - protein, 26 aa, Artificial Sequence
  Description of Artificial Sequence: Synthetic peptide
PDTINSQHKNFYDWFVRQVSGVGTSS

SEQ ID NO: 400 - protein, 26 aa, Artificial Sequence
  Description of Artificial Sequence: Synthetic peptide
SEDVDSRHENFYDWFVRQVSGIGLQD

SEQ ID NO: 401 - protein, 26 aa, Artificial Sequence
  Description of Artificial Sequence: Synthetic peptide
PAPADAFDHNFYDWFARQLSATTTIQ

SEQ ID NO: 402 - protein, 26 aa, Artificial Sequence
  Description of Artificial Sequence: Synthetic peptide
MVQRISIHENFYDWFVRQISGSAVPP

SEQ ID NO: 403 - protein, 26 aa, Artificial Sequence
  Description of Artificial Sequence: Synthetic peptide
GNVRGQFHGQFYDWFARQVSGSEGDA

SEQ ID NO: 404 - protein, 26 aa, Artificial Sequence
  Description of Artificial Sequence: Synthetic peptide
PDAEKQFHETFYGWFVRQISEDSANS

SEQ ID NO: 405 - protein, 26 aa, Artificial Sequence
  Description of Artificial Sequence: Synthetic peptide
FGRGVHCDENFYDWFVCQVSGALLEG

SEQ ID NO: 406 - protein, 26 aa, Artificial Sequence
  Description of Artificial Sequence: Synthetic peptide
ETPLTELHEQFYDWFVRQVSGFPGGV

SEQ ID NO: 407 - protein, 26 aa, Artificial Sequence
  Description of Artificial Sequence: Synthetic peptide
QHRGPHFHEDFYDWFVRQVSSAVPSD

SEQ ID NO: 408 - protein, 26 aa, Artificial Sequence
  Description of Artificial Sequence: Synthetic peptide
RQDPGLFHDNFYDWFDRLVSAWDGQE

SEQ ID NO: 409 - protein, 26 aa, Artificial Sequence
  Description of Artificial Sequence: Synthetic peptide
QAAVGVCNKDFYAWFACQVREDFAKA

SEQ ID NO: 410 - protein, 26 aa, Artificial Sequence
  Description of Artificial Sequence: Synthetic peptide
RNWNLQFNENFYDWFDRQVSALRGGG

SEQ ID NO: 411 - protein, 26 aa, Artificial Sequence
  Description of Artificial Sequence: Synthetic peptide
RSEQYRFHENFYEWFDRQVSRMGLLG

SEQ ID NO: 412 - protein, 26 aa, Artificial Sequence
  Description of Artificial Sequence: Synthetic peptide
GAGGRDFDEDFYDWFVRQVSGQVTSG

SEQ ID NO: 413 - protein, 26 aa, Artificial Sequence
  Description of Artificial Sequence: Synthetic peptide
SPEGNLVHDQFYDWFVRQLSSTSAGT

SEQ ID NO: 414 - protein, 26 aa, Artificial Sequence
  Description of Artificial Sequence: Synthetic peptide
QGGLGDFDEDFYDWFARQVSRRDRAD

SEQ ID NO: 415 - protein, 26 aa, Artificial Sequence
  Description of Artificial Sequence: Synthetic peptide
LSQGVGFQENFYEWFERQVSGWDGRD

SEQ ID NO: 416 - protein, 26 aa, Artificial Sequence
  Description of Artificial Sequence: Synthetic peptide
VFERSRCHDNFYDWFFCQVSGQADGG

SEQ ID NO: 417 - protein, 26 aa, Artificial Sequence
  Description of Artificial Sequence: Synthetic peptide
LLASRAFHENFYDWFARQVSGTQPPG

SEQ ID NO: 418 - protein, 26 aa, Artificial Sequence
  Description of Artificial Sequence: Synthetic peptide
VPDAQIFHESFYDWFVRQASAGGPAD

SEQ ID NO: 419 - protein, 26 aa, Artificial Sequence
  Description of Artificial Sequence: Synthetic peptide
ANQMGRFHDNFYDWFDRQVSRYERGT

SEQ ID NO: 420 - protein, 26 aa, Artificial Sequence
  Description of Artificial Sequence: Synthetic peptide
PSRKDGLHQSFYDWFARQVQDMEGRA

SEQ ID NO: 421 - protein, 26 aa, Artificial Sequence
  Description of Artificial Sequence: Synthetic peptide
QAVTRRFHENFYDWFARQVSEEGGWS

SEQ ID NO: 422 - protein, 26 aa, Artificial Sequence
  Description of Artificial Sequence: Synthetic peptide
GYAVGQYQANFYDWFVRQVDGMSNGG

SEQ ID NO: 423 - protein, 26 aa, Artificial Sequence
  Description of Artificial Sequence: Synthetic peptide
GHQRDLLHESFYDWFVRQVSEAEGGG

SEQ ID NO: 424 - protein, 26 aa, Artificial Sequence
  Description of Artificial Sequence: Synthetic peptide
DRPSSFIHENFYEWFARQVSQSGSSG

SEQ ID NO: 425 - protein, 26 aa, Artificial Sequence
  Description of Artificial Sequence: Synthetic peptide
ERTAETLHEQFYDWFVRQVSAMDGES

SEQ ID NO: 426 - protein, 26 aa, Artificial Sequence
  Description of Artificial Sequence: Synthetic peptide
LTSQLLSHEDFYDWFVRQVSGVGGSG

SEQ ID NO: 427 - protein, 26 aa, Artificial Sequence
  Description of Artificial Sequence: Synthetic peptide
PDRSDRLDDNFYDWFVRQVSQVINED

SEQ ID NO: 428 - protein, 26 aa, Artificial Sequence
  Description of Artificial Sequence: Synthetic peptide
RAGGVGLHDNFYDWFVRQVSGGDSGP

SEQ ID NO: 429 - protein, 26 aa, Artificial Sequence
  Description of Artificial Sequence: Synthetic peptide
ADCYVQLHENFYDWFRRQVCNLQEGM

SEQ ID NO: 430 - protein, 26 aa, Artificial Sequence
  Description of Artificial Sequence: Synthetic peptide
RQGHAGFHDNFYDWFVRQVSGSTPQV

SEQ ID NO: 431 - protein, 21 aa, Artificial Sequence
  Description of Artificial Sequence: Synthetic peptide
VTFTSAVFHENFYDWFVRQVS

SEQ ID NO: 432 - protein, 26 aa, Artificial Sequence
  Description of Artificial Sequence: Synthetic peptide
GIISQSCPESFYDWFAGQVSDPWWCW

SEQ ID NO: 433 - protein, 26 aa, Artificial Sequence
  Description of Artificial Sequence: Synthetic peptide
VGRASGFPENFYDWFGRQLSLQSGEQ

SEQ ID NO: 434 - protein, 26 aa, Artificial Sequence
  Description of Artificial Sequence: Synthetic peptide
VGYQGQGDENFYDWFIRQVSGRLGVQ

SEQ ID NO: 435 - protein, 26 aa, Artificial Sequence
  Description of Artificial Sequence: Synthetic peptide
SACQFDCHENFYDWFARQVSGGAAYG

SEQ ID NO: 436 - protein, 26 aa, Artificial Sequence
  Description of Artificial Sequence: Synthetic peptide
SAAQLFFQESFYDWFLRQVAESSQPN

SEQ ID NO: 437 - protein, 26 aa, Artificial Sequence
  Description of Artificial Sequence: Synthetic peptide
AVRATRFDEAFYDWFVRQISDGQGNK

SEQ ID NO: 438 - protein, 26 aa, Artificial Sequence
  Description of Artificial Sequence: Synthetic peptide
VNQSGSIHENFYDWFERQVSHQRGVR

SEQ ID NO: 439 - protein, 26 aa, Artificial Sequence
  Description of Artificial Sequence: Synthetic peptide
APDPSDFQEIFYDWFVRQVSRMPGGG

SEQ ID NO: 440 - protein, 25 aa, Artificial Sequence
  Description of Artificial Sequence: Synthetic peptide
SSCDGAGHESFYEWFVRQVSGCRSV

SEQ ID NO: 441 - protein, 26 aa, Artificial Sequence
  Description of Artificial Sequence: Synthetic peptide
RAGSSDFHEDFYEWFVRQVSLSLKGK

SEQ ID NO: 442 - protein, 26 aa, Artificial Sequence
  Description of Artificial Sequence: Synthetic peptide
QAVQPGFHEEFYDWFVRQVSTGVGGG

SEQ ID NO: 443 - protein, 26 aa, Artificial Sequence
  Description of Artificial Sequence: Synthetic peptide
SSIGGGFHENFYDWFSRQLSQSPPLK

SEQ ID NO: 444 - protein, 26 aa, Artificial Sequence
  Description of Artificial Sequence: Synthetic peptide
QSPVGSSHEDFYDWFFRQVAQSGAHQ

SEQ ID NO: 445 - protein, 26 aa, Artificial Sequence
  Description of Artificial Sequence: Synthetic peptide
NYRRQVFNGNFYDWFDRQVFSLVTPG

SEQ ID NO: 446 - protein, 26 aa, Artificial Sequence
  Description of Artificial Sequence: Synthetic peptide
TLDGGSFEEQFYDWFVRQLSYRTNPD

SEQ ID NO: 447 - protein, 26 aa, Artificial Sequence
  Description of Artificial Sequence: Synthetic peptide
FYVQQWGHENFYDWFDRQVSQSGGAG

SEQ ID NO: 448 - protein, 26 aa, Artificial Sequence
  Description of Artificial Sequence: Synthetic peptide
LRRQAPVEENFYDWFVRQVSGDRVGG

SEQ ID NO: 449 - protein, 26 aa, Artificial Sequence
  Description of Artificial Sequence: Synthetic peptide
RCGRELYHSTFYDWFDRQVAGRTCPS

SEQ ID NO: 450 - protein, 26 aa, Artificial Sequence
  Description of Artificial Sequence: Synthetic peptide
CCLLCRFQQNFYDWFVCQGISRLRPL

SEQ ID NO: 451 - protein, 26 aa, Artificial Sequence
  Description of Artificial Sequence: Synthetic peptide
PPLASDLDVQFYGWFVQQVSPPGRGG

SEQ ID NO: 452 - protein, 25 aa, Artificial Sequence
  Description of Artificial Sequence: Synthetic peptide
GAPVDQLHEDFYDWFVRQVSQAATG

SEQ ID NO: 453 - protein, 26 aa, Artificial Sequence
  Description of Artificial Sequence: Synthetic peptide
RSASGSLPEQFYDWFVRQVSLSGTDK

SEQ ID NO: 454 - protein, 26 aa, Artificial Sequence
  Description of Artificial Sequence: Synthetic peptide
SRVTTVFHENFYDWFVRQLSDSAISG

SEQ ID NO: 455 - protein, 26 aa, Artificial Sequence
  Description of Artificial Sequence: Synthetic peptide
DERGGKFREDFYDWFVRQVSESRFGQ

SEQ ID NO: 456 - protein, 26 aa, Artificial Sequence
  Description of Artificial Sequence: Synthetic peptide
RGAVAGFHDQFYDWFDRQVSRVHKFG

SEQ ID NO: 457 - protein, 26 aa, Artificial Sequence
  Description of Artificial Sequence: Synthetic peptide
AICDAGFHEHFYDWFALQVSDCGRQS

SEQ ID NO: 458 - protein, 26 aa, Artificial Sequence
  Description of Artificial Sequence: Synthetic peptide
LGYQEPFQQNFYDWFVRQVSGAENAG

SEQ ID NO: 459 - protein, 26 aa, Artificial Sequence
  Description of Artificial Sequence: Synthetic peptide
WRGHGTFHEDFYDWFVRQVSGSGSST

SEQ ID NO: 460 - protein, 26 aa, Artificial Sequence
  Description of Artificial Sequence: Synthetic peptide
GGRVGVLHENFYDWFDRQVSLRGADG

SEQ ID NO: 461 - protein, 26 aa, Artificial Sequence
  Description of Artificial Sequence: Synthetic peptide
CNLTAGFHEQFYHWFAIQVCGDAENA

SEQ ID NO: 462 - protein, 26 aa, Artificial Sequence
  Description of Artificial Sequence: Synthetic peptide
ERGEDMFHENFYDWFVRQISGRQGGG

SEQ ID NO: 463 - protein, 26 aa, Artificial Sequence
  Description of Artificial Sequence: Synthetic peptide
TNQGVGFYDSFYGWFVRQIQYGVDSG

SEQ ID NO: 464 - protein, 26 aa, Artificial Sequence
  Description of Artificial Sequence: Synthetic peptide
HLADGQFHEKFYDWFERQISSRCNDC

SEQ ID NO: 465 - protein, 26 aa, Artificial Sequence
  Description of Artificial Sequence: Synthetic peptide
QTFGKSLHENFYDWFVRQVSREEGGD

SEQ ID NO: 466 - protein, 26 aa, Artificial Sequence
  Description of Artificial Sequence: Synthetic peptide
FRTLAAQHDSFYDWFDRQVSGAAGER

SEQ ID NO: 467 - protein, 26 aa, Artificial Sequence
  Description of Artificial Sequence: Synthetic peptide
SASTHQFHENFYDWFVRQVSGAQKIL

SEQ ID NO: 468 - protein, 21 aa, Artificial Sequence
  Description of Artificial Sequence: Synthetic peptide
  MOD_RES (1)..(6): Variable amino acid
  MOD_RES (9)..(10): Variable amino acid
  MOD_RES (13): Variable amino acid
  MOD_RES (16)..(21): Variable amino acid
XXXXXXFHXXFYXWFXXXXXX

SEQ ID NO: 469 - protein, 21 aa, Artificial Sequence
  Description of Artificial Sequence: Synthetic peptide
VTFTSAVFHENFYDWFVRQVS

SEQ ID NO: 470 - protein, 20 aa, Artificial Sequence
  Description of Artificial Sequence: Synthetic peptide
  MOD_RES (19): Unknown amino acid; translation read-through at TGA stop codon
QSDSGTVHDRFYGWFRDTXA

SEQ ID NO: 471 - protein, 21 aa, Artificial Sequence
  Description of Artificial Sequence: Synthetic peptide
WTDVDGFHSGFYRWFQNQWER

SEQ ID NO: 472 - protein, 21 aa, Artificial Sequence
  Description of Artificial Sequence: Synthetic peptide
VASGHVLHGQFYRWFVDQFAL

SEQ ID NO: 473 - protein, 21 aa, Artificial Sequence
  Description of Artificial Sequence: Synthetic peptide
QARVGNVHQQFYEWFREVMQG

SEQ ID NO: 474 - protein, 21 aa, Artificial Sequence
  Description of Artificial Sequence: Synthetic peptide
VGDFCVSHDCFYGWFLRESMQ

SEQ ID NO: 475 - protein, 20 aa, Artificial Sequence
  Description of Artificial Sequence: Synthetic peptide
SGSRPVFHEQFYEWFVDQLG

SEQ ID NO: 476 - protein, 21 aa, Artificial Sequence
  Description of Artificial Sequence: Synthetic peptide
QFSAGAFHGDFYGWFRALYNG

SEQ ID NO: 477 - protein, 21 aa, Artificial Sequence
  Description of Artificial Sequence: Synthetic peptide
SRFDERLHHQFYEWFRVLNEP

SEQ ID NO: 478 - protein, 21 aa, Artificial Sequence
  Description of Artificial Sequence: Synthetic peptide
DSVNSDLHRAFYGWFAEQWRA

SEQ ID NO: 479 - protein, 21 aa, Artificial Sequence
  Description of Artificial Sequence: Synthetic peptide
GSVDREIHGPFYSWFSEQLWG

SEQ ID NO: 480 - protein, 21 aa, Artificial Sequence
  Description of Artificial Sequence: Synthetic peptide
SAKTPVLHDGFYMWFEAQSES

SEQ ID NO: 481 - protein, 21 aa, Artificial Sequence
  Description of Artificial Sequence: Synthetic peptide
LVVGRRFHQSFYDWFVAAAGG

SEQ ID NO: 482 - protein, 21 aa, Artificial Sequence
  Description of Artificial Sequence: Synthetic peptide
IMWPCTFQDPFYCWFQTEQGR

SEQ ID NO: 483 - protein, 21 aa, Artificial Sequence
  Description of Artificial Sequence: Synthetic peptide
VVGPLDIHERFYGWFHQQGGA

SEQ ID NO: 484 - protein, 21 aa, Artificial Sequence
  Description of Artificial Sequence: Synthetic peptide
VVPKAGFHEAFYEWFRRQDRD

SEQ ID NO: 485 - protein, 21 aa, Artificial Sequence
  Description of Artificial Sequence: Synthetic peptide
QSFVTSVHTRFYAWFASALEM

SEQ ID NO: 486 - protein, 21 aa, Artificial Sequence
  Description of Artificial Sequence: Synthetic peptide
SRGLGLYHSGFYGWFERQFNQ

SEQ ID NO: 487 - protein, 21 aa, Artificial Sequence
  Description of Artificial Sequence: Synthetic peptide
GADTGAVHRRFYLWFEQLSGG

SEQ ID NO: 488 - protein, 21 aa, Artificial Sequence
  Description of Artificial Sequence: Synthetic peptide
PGNRPTFHAEFYRWFREAQGS

SEQ ID NO: 489 - protein, 21 aa, Artificial Sequence
  Description of Artificial Sequence: Synthetic peptide
VAVAWGLHESFYAWFENQFSD

SEQ ID NO: 490 - protein, 21 aa, Artificial Sequence
  Description of Artificial Sequence: Synthetic peptide
GFNTGTFHDQFYYWFWEAAGG

SEQ ID NO: 491 - protein, 21 aa, Artificial Sequence
  Description of Artificial Sequence: Synthetic peptide
GDGLTAFHQGFYEWFDIQMYG

SEQ ID NO: 492 - protein, 21 aa, Artificial Sequence
  Description of Artificial Sequence: Synthetic peptide
VGVNRQFHTRFYAWFDEQLGG

SEQ ID NO: 493 - protein, 21 aa, Artificial Sequence
  Description of Artificial Sequence: Synthetic peptide
GPRGQRLHDAFYSWFDALRVN

SEQ ID NO: 494 - protein, 21 aa, Artificial Sequence
  Description of Artificial Sequence: Synthetic peptide
LGTLAVFHELFYGWFERQLGG

SEQ ID NO: 495 - protein, 21 aa, Artificial Sequence
  Description of Artificial Sequence: Synthetic peptide
LGGYCGFNCQFYRWFDNLADR

SEQ ID NO: 496 - protein, 21 aa, Artificial Sequence
  Description of Artificial Sequence: Synthetic peptide
FSGWADYQSGFYQWFAEELAN

SEQ ID NO: 497 - protein, 21 aa, Artificial Sequence
  Description of Artificial Sequence: Synthetic peptide
WGPFSVFDESFYRWFAQASDD

SEQ ID NO: 498 - protein, 21 aa, Artificial Sequence
  Description of Artificial Sequence: Synthetic peptide
PRNEGLVHGLFYDWFQRALSG

SEQ ID NO: 499 - protein, 21 aa, Artificial Sequence
  Description of Artificial Sequence: Synthetic peptide
DEGGAPLDVMFYRWFEQAVRG

SEQ ID NO: 500 - protein, 21 aa, Artificial Sequence
  Description of Artificial Sequence: Synthetic peptide
QSGNRGSHGAFYSWFRDVLAN

SEQ ID NO: 501 - protein, 21 aa, Artificial Sequence
  Description of Artificial Sequence: Synthetic peptide
MRQRDGFNSSFYGWFAAALGE

SEQ ID NO: 502 - protein, 21 aa, Artificial Sequence
  Description of Artificial Sequence: Synthetic peptide
SEERKKVHSQFYSWFDRQLLG

SEQ ID NO: 503 - protein, 21 aa, Artificial Sequence
  Description of Artificial Sequence: Synthetic peptide
PSPNAPFHGGFYDWFDWVQGS

SEQ ID NO: 504 - protein, 21 aa, Artificial Sequence
  Description of Artificial Sequence: Synthetic peptide
FHRPGSFNTNFYQWFDDQMNQ

SEQ ID NO: 505 - protein, 21 aa, Artificial Sequence
  Description of Artificial Sequence: Synthetic peptide
SDDSSTLNGRFYTWFHMQLLD

SEQ ID NO: 506 - protein, 21 aa, Artificial Sequence
  Description of Artificial Sequence: Synthetic peptide
QRGGGGFHEGFYSWFRSQSLL

SEQ ID NO: 507 - protein, 21 aa, Artificial Sequence
  Description of Artificial Sequence: Synthetic peptide
SGSRPVFHEQFYEWFVDQLGL

SEQ ID NO: 508 - protein, 21 aa, Artificial Sequence
  Description of Artificial Sequence: Synthetic peptide
GGSSQAFHGAFYEWFSAQLRG

SEQ ID NO: 509 - protein, 21 aa, Artificial Sequence
  Description of Artificial Sequence: Synthetic peptide
AFVSERVNQRFYDWFRDQMRS

SEQ ID NO: 510 - protein, 21 aa, Artificial Sequence
  Description of Artificial Sequence: Synthetic peptide
VRHPTRFHDEFYRWFTEQLTT

SEQ ID NO: 511 - protein, 21 aa, Artificial Sequence
  Description of Artificial Sequence: Synthetic peptide
ARLLNIFDRGFYNWFQRQLDE

SEQ ID NO: 512 - protein, 21 aa, Artificial Sequence
  Description of Artificial Sequence: Synthetic peptide
PSLSSNLHESFYRWFDQLVST

SEQ ID NO: 513 - protein, 21 aa, Artificial Sequence
  Description of Artificial Sequence: Synthetic peptide
FAFGLGFHQGFYDWFAHQLEG

SEQ ID NO: 514 - protein, 21 aa, Artificial Sequence
  Description of Artificial Sequence: Synthetic peptide
VSATVMLHREFYDWFGLQLLD

SEQ ID NO: 515 - protein, 21 aa, Artificial Sequence
  Description of Artificial Sequence: Synthetic peptide
GGVSGVLHDRFYSWFERQLAG

SEQ ID NO: 516 - protein, 21 aa, Artificial Sequence
  Description of Artificial Sequence: Synthetic peptide
GLGIASFHEGFYSWFTAQLGA

SEQ ID NO: 517 - protein, 21 aa, Artificial Sequence
  Description of Artificial Sequence: Synthetic peptide
RVDAAALNAGFYEWFRGVIQG

SEQ ID NO: 518 - protein, 21 aa, Artificial Sequence
  Description of Artificial Sequence: Synthetic peptide
GGAGRSFHDAFYEWFERQMAG

SEQ ID NO: 519 - protein, 21 aa, Artificial Sequence
  Description of Artificial Sequence: Synthetic peptide
EGARQGFHARFYSWFAQQLAL

SEQ ID NO: 520 - protein, 21 aa, Artificial Sequence
  Description of Artificial Sequence: Synthetic peptide
VLLPGVVHGGFYDWFSRQLSS

SEQ ID NO: 521 - protein, 21 aa, Artificial Sequence
  Description of Artificial Sequence: Synthetic peptide
GALSDRYNNVFYDWFREQLLG

SEQ ID NO: 522 - protein, 21 aa, Artificial Sequence
  Description of Artificial Sequence: Synthetic peptide
PDSFMSLHQRFYSWFQAQVGT

SEQ ID NO: 523 - protein, 21 aa, Artificial Sequence
  Description of Artificial Sequence: Synthetic peptide
RVYKANFHNEFYGWFREQLLG

SEQ ID NO: 524 - protein, 21 aa, Artificial Sequence
  Description of Artificial Sequence: Synthetic peptide
HSGMRDVHARFYSWFSEQLSG

SEQ ID NO: 525 - protein, 21 aa, Artificial Sequence
  Description of Artificial Sequence: Synthetic peptide
ARLLERFQDPFYEWFETLMGD

SEQ ID NO: 526 - protein, 21 aa, Artificial Sequence
  Description of Artificial Sequence: Synthetic peptide
RNSSGNFHDKFYNWFEAQLKG

SEQ ID NO: 527 - protein, 21 aa, Artificial Sequence
  Description of Artificial Sequence: Synthetic peptide
GSMSPVFNDQFYGWFRDLVDE

SEQ ID NO: 528 - protein, 21 aa, Artificial Sequence
  Description of Artificial Sequence: Synthetic peptide
SCTGRQFDGCFYAWFEDQLVG

SEQ ID NO: 529 - protein, 21 aa, Artificial Sequence
  Description of Artificial Sequence: Synthetic peptide
GIAVQSLHDSFYRWFDNALGS

SEQ ID NO: 530 - protein, 21 aa, Artificial Sequence
  Description of Artificial Sequence: Synthetic peptide
IGPPGSLHRGFYDWFAEQVEA

SEQ ID NO: 531 - protein, 21 aa, Artificial Sequence
  Description of Artificial Sequence: Synthetic peptide
GAAGISFHRGFYDWFAAQVRD

SEQ ID NO: 532 - protein, 21 aa, Artificial Sequence
  Description of Artificial Sequence: Synthetic peptide
GVDVTDFHKDFYSWFQRQLNG

SEQ ID NO: 533 - protein, 21 aa, Artificial Sequence
  Description of Artificial Sequence: Synthetic peptide
WAGRAGIHGGFYEWFNRQLRG

SEQ ID NO: 534 - protein, 21 aa, Artificial Sequence
  Description of Artificial Sequence: Synthetic peptide
LGQLAAFHLGFYEWFSEAVAA

SEQ ID NO: 535 - protein, 21 aa, Artificial Sequence
  Description of Artificial Sequence: Synthetic peptide
VHSVSRLNVGFYQWFQDQLSG

SEQ ID NO: 536 - protein, 21 aa, Artificial Sequence
  Description of Artificial Sequence: Synthetic peptide
LGLMAIFDRGFYGWFEQQLSG

SEQ ID NO: 537 - protein, 21 aa, Artificial Sequence
  Description of Artificial Sequence: Synthetic peptide
VARGSSLHDDFYEWFASQLRT

SEQ ID NO: 538 - protein, 21 aa, Artificial Sequence
  Description of Artificial Sequence: Synthetic peptide
LGYIGALNTQFYSWFADLVGS

SEQ ID NO: 539 - protein, 21 aa, Artificial Sequence
  Description of Artificial Sequence: Synthetic peptide
EDSRLRLHEGFYGWFRKQLGD

SEQ ID NO: 540 - protein, 21 aa, Artificial Sequence
  Description of Artificial Sequence: Synthetic peptide
GRDNMKFHSGFYDWFTQQLAG

SEQ ID NO: 541 - protein, 21 aa, Artificial Sequence
  Description of Artificial Sequence: Synthetic peptide
AGVMGGFHQEFYLWFERALSN

SEQ ID NO: 542 - protein, 21 aa, Artificial Sequence
  Description of Artificial Sequence: Synthetic peptide
AGHVGQVYDGFYGWFREQLGA

SEQ ID NO: 543 - protein, 21 aa, Artificial Sequence
  Description of Artificial Sequence: Synthetic peptide
FVQNIGFDYDFYGWFVREVEK

SEQ ID NO: 544 - protein, 21 aa, Artificial Sequence
  Description of Artificial Sequence: Synthetic peptide
PVGIGGLHRAFYQWFQSQVDA

SEQ ID NO: 545 - protein, 21 aa, Artificial Sequence
  Description of Artificial Sequence: Synthetic peptide
GSRQEADHQAFYDWFNLVLGV

SEQ ID NO: 546 - protein, 21 aa, Artificial Sequence
  Description of Artificial Sequence: Synthetic peptide
AGGRKPFHDDFYGWFRDQLAE

SEQ ID NO: 547 - protein, 21 aa, Artificial Sequence
  Description of Artificial Sequence: Synthetic peptide
DLASHGFHDAFYNWFSVQLNS

SEQ ID NO: 548 - protein, 21 aa, Artificial Sequence
  Description of Artificial Sequence: Synthetic peptide
GSNGGGVHGQFYAWFVEALSG

SEQ ID NO: 549 - protein, 21 aa, Artificial Sequence
  Description of Artificial Sequence: Synthetic peptide
RGRASTFHDGFYGWFSQQLRF

SEQ ID NO: 550 - protein, 21 aa, Artificial Sequence
  Description of Artificial Sequence: Synthetic peptide
SPARRVSHHDFYGWFAKQLES

SEQ ID NO: 551 - protein, 21 aa, Artificial Sequence
  Description of Artificial Sequence: Synthetic peptide
SSDVGAFHSAFYDWFKAQLSG

SEQ ID NO: 552 - protein, 21 aa, Artificial Sequence
  Description of Artificial Sequence: Synthetic peptide
PTVHRAFDDLFYGWFAKQVED

SEQ ID NO: 553 - protein, 21 aa, Artificial Sequence
  Description of Artificial Sequence: Synthetic peptide
SSNTVGLDERFYAWFVDQLGA

SEQ ID NO: 554 - protein, 21 aa, Artificial Sequence
  Description of Artificial Sequence: Synthetic peptide
PGAAEGFHSAFYDWFAQAVSG

SEQ ID NO: 555 - protein, 21 aa, Artificial Sequence
  Description of Artificial Sequence: Synthetic peptide
MRSEASFHVEFYSWFEEQLRS

SEQ ID NO: 556 - protein, 21 aa, Artificial Sequence
  Description of Artificial Sequence: Synthetic peptide
VSRYGGQQDGFYHWFSDLLKG

SEQ ID NO: 557 - protein, 21 aa, Artificial Sequence
  Description of Artificial Sequence: Synthetic peptide
RPSSGGLHYGFYHWFRVQEEM

SEQ ID NO: 558 - protein, 21 aa, Artificial Sequence
  Description of Artificial Sequence: Synthetic peptide
SNIEEHFHMQFYRWFSDALGN

SEQ ID NO: 559 - protein, 21 aa, Artificial Sequence
  Description of Artificial Sequence: Synthetic peptide
ANDCLGLHAGFYGWFACQLGG

SEQ ID NO: 560 - protein, 21 aa, Artificial Sequence
  Description of Artificial Sequence: Synthetic peptide
TGHRLGLDEQFYWWFRDALSG

SEQ ID NO: 561 - protein, 21 aa, Artificial Sequence
  Description of Artificial Sequence: Synthetic peptide
VLTSNTLHQRFYSWFAAARRE

SEQ ID NO: 562 - protein, 21 aa, Artificial Sequence
  Description of Artificial Sequence: Synthetic peptide
CVAQGGFQSSFYCWFAGLDID

SEQ ID NO: 563 - protein, 21 aa, Artificial Sequence
  Description of Artificial Sequence: Synthetic peptide
NGQSSRFHTAFYDWFAAQLSG

SEQ ID NO: 564 - protein, 21 aa, Artificial Sequence
  Description of Artificial Sequence: Synthetic peptide
SVPRGTVHDAFYQWFREVALG

SEQ ID NO: 565 - protein, 21 aa, Artificial Sequence
  Description of Artificial Sequence: Synthetic peptide
GARGSTFHDQFYEWFWVQLGD

SEQ ID NO: 566 - protein, 21 aa, Artificial Sequence
  Description of Artificial Sequence: Synthetic peptide
PPGMNGFHTSFYSWFVDQLGD

SEQ ID NO: 567 - protein, 21 aa, Artificial Sequence
  Description of Artificial Sequence: Synthetic peptide
AVGTLGYHSGFYRWFERQLGG

SEQ ID NO: 568 - protein, 21 aa, Artificial Sequence
  Description of Artificial Sequence: Synthetic peptide
ELQARGVHRNFYRWFEAQVSG

SEQ ID NO: 569 - protein, 21 aa, Artificial Sequence
  Description of Artificial Sequence: Synthetic peptide
HRVARAFHEQFYDWFEKAVSG

SEQ ID NO: 570 - protein, 21 aa, Artificial Sequence
  Description of Artificial Sequence: Synthetic peptide
GAMEPDYHRSFYQWFAAALGE

SEQ ID NO: 571 - protein, 21 aa, Artificial Sequence
  Description of Artificial Sequence: Synthetic peptide
CPDRQSVDDRFYNWFADALAS

SEQ ID NO: 572 - protein, 21 aa, Artificial Sequence
  Description of Artificial Sequence: Synthetic peptide
GGAQISFHERFYQWFLQEAAG

SEQ ID NO: 573 - protein, 21 aa, Artificial Sequence
  Description of Artificial Sequence: Synthetic peptide
HKRGIVQHGAFYAWFDSLLSG

SEQ ID NO: 574 - protein, 21 aa, Artificial Sequence
  Description of Artificial Sequence: Synthetic peptide
QASDNRSDGQFYLWFEKLLSS

SEQ ID NO: 575 - protein, 21 aa, Artificial Sequence
  Description of Artificial Sequence: Synthetic peptide
DRGRMGVDEGFYNWFARQMQE

SEQ ID NO: 576 - protein, 21 aa, Artificial Sequence
  Description of Artificial Sequence: Synthetic peptide
VTFTSAVFHENFYDWFVRQVS

SEQ ID NO: 577 - protein, 21 aa, Artificial Sequence
  Description of Artificial Sequence: Synthetic peptide
TASQECFDDGFYGWFRAWRCT

SEQ ID NO: 578 - protein, 21 aa, Artificial Sequence
  Description of Artificial Sequence: Synthetic peptide
SLDWRWSEEPFYRWFQRALAG

SEQ ID NO: 579 - protein, 21 aa, Artificial Sequence
  Description of Artificial Sequence: Synthetic peptide
CMSLSDCHRKFYGWFKSQGGE

SEQ ID NO: 580 - protein, 21 aa, Artificial Sequence
  Description of Artificial Sequence: Synthetic peptide
LALCRRSPGSFYGWFQAAVGC

SEQ ID NO: 581 - protein, 21 aa, Artificial Sequence
  Description of Artificial Sequence: Synthetic peptide
PRSATMSDGGFYWWFASQLGL

SEQ ID NO: 582 - protein, 21 aa, Artificial Sequence
  Description of Artificial Sequence: Synthetic peptide
  MOD_RES (14): Unknown amino acid; translation read-through at TGA stop codon
LRRSSVFHDPFYEXISRLVGG

SEQ ID NO: 583 - protein, 21 aa, Artificial Sequence
  Description of Artificial Sequence: Synthetic peptide
ARLQQQFHGGFYEWFRAQVSP

SEQ ID NO: 584 - protein, 21 aa, Artificial Sequence
  Description of Artificial Sequence: Synthetic peptide
AQLDNLCHEPFYSWFCAVTRE

SEQ ID NO: 585 - protein, 21 aa, Artificial Sequence
  Description of Artificial Sequence: Synthetic peptide
WTCDTAFHQDFYQWFCDKLGV

SEQ ID NO: 586 - protein, 21 aa, Artificial Sequence
  Description of Artificial Sequence: Synthetic peptide
GKEGFGLDRDFYWWFREQLGP

SEQ ID NO: 587 - protein, 21 aa, Artificial Sequence
  Description of Artificial Sequence: Synthetic peptide
GRAPSSFDCDFYCWFRNQVQS

SEQ ID NO: 588 - protein, 21 aa, Artificial Sequence
  Description of Artificial Sequence: Synthetic peptide
DVEAETQHRLFYAWFLSQLGS

SEQ ID NO: 589 - protein, 21 aa, Artificial Sequence
  Description of Artificial Sequence: Synthetic peptide
ISVTAVFHDGFYGWFNEQVSK

SEQ ID NO: 590 - protein, 21 aa, Artificial Sequence
  Description of Artificial Sequence: Synthetic peptide
NSEHGRLDVDFYGWFARVIQQ

SEQ ID NO: 591 - protein, 21 aa, Artificial Sequence
  Description of Artificial Sequence: Synthetic peptide
GPLGDGCQDGFYGWFMCQVST

SEQ ID NO: 592 - protein, 21 aa, Artificial Sequence
  Description of Artificial Sequence: Synthetic peptide
KRSAYNFHDPFYDWFRMQLSG

SEQ ID NO: 593 - protein, 21 aa, Artificial Sequence
  Description of Artificial Sequence: Synthetic peptide
ASEPGGYLDPFYGWFREQLRA

SEQ ID NO: 594 - protein, 21 aa, Artificial Sequence
  Description of Artificial Sequence: Synthetic peptide
NRGDGGVHSGFYNWFRLQLSG

SEQ ID NO: 595 - protein, 21 aa, Artificial Sequence
  Description of Artificial Sequence: Synthetic peptide
ASKGSSLHNDFYGWFAQQLAR

SEQ ID NO: 596 - protein, 21 aa, Artificial Sequence
  Description of Artificial Sequence: Synthetic peptide
ANVSMWIQVGFYDWFDAQLRQ

SEQ ID NO: 597 - protein, 21 aa, Artificial Sequence
  Description of Artificial Sequence: Synthetic peptide
RTSPGSLHDPFYDWFQQQLGG

SEQ ID NO: 598 - protein, 21 aa, Artificial Sequence
  Description of Artificial Sequence: Synthetic peptide
PGVMSSFHGGFYSWFREQLNG

SEQ ID NO: 599 - protein, 21 aa, Artificial Sequence
  Description of Artificial Sequence: Synthetic peptide
CLANSEDHDSFYGWFCQALGG

SEQ ID NO: 600 - protein, 21 aa, Artificial Sequence
  Description of Artificial Sequence: Synthetic peptide
GGSMGGMHGSFYEWFALQLRS

SEQ ID NO: 601 - protein, 21 aa, Artificial Sequence
  Description of Artificial Sequence: Synthetic peptide
RPQGGSIHAGFYQWFRDAVAG

SEQ ID NO: 602 - protein, 21 aa, Artificial Sequence
  Description of Artificial Sequence: Synthetic peptide
GALSSLFDAAFYDWFNRQLEG

SEQ ID NO: 603 - protein, 21 aa, Artificial Sequence
  Description of Artificial Sequence: Synthetic peptide
KVDLRGFHDGFYGWFARQLAG

SEQ ID NO: 604 - protein, 21 aa, Artificial Sequence
  Description of Artificial Sequence: Synthetic peptide
CSGLQRCHDSFYSWFESVVRE

SEQ ID NO: 605 - protein, 21 aa, Artificial Sequence
  Description of Artificial Sequence: Synthetic peptide
DSLGISFHEGFYDWFRRQLDM

SEQ ID NO: 606 - protein, 18 aa, Artificial Sequence
  Description of Artificial Sequence: Synthetic peptide
SGVFNGTFYDWFRIQLGE

SEQ ID NO: 607 - protein, 21 aa, Artificial Sequence
  Description of Artificial Sequence: Synthetic peptide
GYREMRSDLGFYQWFRDQLGL

SEQ ID NO: 608 - protein, 21 aa, Artificial Sequence
  Description of Artificial Sequence: Synthetic peptide
SVFMQHDHVGFYAWFRSLMEE

SEQ ID NO: 609 - protein, 21 aa, Artificial Sequence
  Description of Artificial Sequence: Synthetic peptide
FRHITEVDRSFYGWFVEQLRG

SEQ ID NO: 610 - protein, 21 aa, Artificial Sequence
  Description of Artificial Sequence: Synthetic peptide
WAGGSDVDGSFYDWFQRLLAS

SEQ ID NO: 611 - protein, 21 aa, Artificial Sequence
  Description of Artificial Sequence: Synthetic peptide
GLQNVSFHSGFYEWFARQVSQ

SEQ ID NO: 612 - protein, 21 aa, Artificial Sequence
  Description of Artificial Sequence: Synthetic peptide
SRVSDPYHVGFYQWFEEVVRG

SEQ ID NO: 613 - protein, 21 aa, Artificial Sequence
  Description of Artificial Sequence: Synthetic peptide
MGGATFFHTGFYDWFAAQLQH

SEQ ID NO: 614 - protein, 21 aa, Artificial Sequence
  Description of Artificial Sequence: Synthetic peptide
RPASRPFHSGFYQWFADQLSH

SEQ ID NO: 615 - protein, 21 aa, Artificial Sequence
  Description of Artificial Sequence: Synthetic peptide
GLAPGNFHEDFYRWFQEQTLG

SEQ ID NO: 616 - protein, 21 aa, Artificial Sequence
  Description of Artificial Sequence: Synthetic peptide
TAAISDFNSLFYGWFEQLLSS

SEQ ID NO: 617 - protein, 21 aa, Artificial Sequence
  Description of Artificial Sequence: Synthetic peptide
LDEDLPQHAGFYGWFAEALGV

SEQ ID NO: 618 - protein, 21 aa, Artificial Sequence
  Description of Artificial Sequence: Synthetic peptide
ASHKSAFDDNFYRWFSMQLRD

SEQ ID NO: 619 - protein, 21 aa, Artificial Sequence
  Description of Artificial Sequence: Synthetic peptide
HTGAGDLHGAFYNWFLEQLGG

SEQ ID NO: 620 - protein, 21 aa, Artificial Sequence
  Description of Artificial Sequence: Synthetic peptide
RRGRDGFHGGFYDWFAAQLSD

SEQ ID NO: 621 - protein, 21 aa, Artificial Sequence
  Description of Artificial Sequence: Synthetic peptide
GNFREAFHADFYSWFERQLQS

SEQ ID NO: 622 - protein, 21 aa, Artificial Sequence
  Description of Artificial Sequence: Synthetic peptide
RDTLPAFHQHFYQWFEKQVSA

SEQ ID NO: 623 - protein, 21 aa, Artificial Sequence
  Description of Artificial Sequence: Synthetic peptide
ERETAAFGQAFYQWFRDQIAG

SEQ ID NO: 624 - protein, 21 aa, Artificial Sequence
  Description of Artificial Sequence: Synthetic peptide
WGEGGGFYDWFYDQLGWEPSH

SEQ ID NO: 625 - protein, 21 aa, Artificial Sequence
  Description of Artificial Sequence: Synthetic peptide
SLVAADLHEGFYGWFRSQLGG

SEQ ID NO: 626 - protein, 21 aa, Artificial Sequence
  Description of Artificial Sequence: Synthetic peptide
TSEVGDFHAEFYSWFEIQLGR

SEQ ID NO: 627 - protein, 21 aa, Artificial Sequence
  Description of Artificial Sequence: Synthetic peptide
TGADGLLHARFYAWFEEQLRE

SEQ ID NO: 628 - protein, 21 aa, Artificial Sequence
  Description of Artificial Sequence: Synthetic peptide
RRSDSSLHRSFYDWFSVQLLN

SEQ ID NO: 629 - protein, 21 aa, Artificial Sequence
  Description of Artificial Sequence: Synthetic peptide
SESKYLLHSGFYGWFEAQLRG

SEQ ID NO: 630 - protein, 21 aa, Artificial Sequence
  Description of Artificial Sequence: Synthetic peptide
HGVIRADHTGFYGWFSKQLSD

SEQ ID NO: 631 - protein, 21 aa, Artificial Sequence
  Description of Artificial Sequence: Synthetic peptide
  MOD_RES (5): Unknown amino acid
LINAXVFRRGFYAWFEEQVSK

SEQ ID NO: 632 - protein, 21 aa, Artificial Sequence
  Description of Artificial Sequence: Synthetic peptide
LQRYIGFHDPFYDWFSRALSG

SEQ ID NO: 633 - protein, 21 aa, Artificial Sequence
  Description of Artificial Sequence: Synthetic peptide
MRTAELFHVGFYDWFDAQLMD

SEQ ID NO: 634 - protein, 21 aa, Artificial Sequence
  Description of Artificial Sequence: Synthetic peptide
WAPPDALHGQFYRWFQRQLDQ

SEQ ID NO: 635 - protein, 21 aa, Artificial Sequence
  Description of Artificial Sequence: Synthetic peptide
AVHAATFHDDFYRWFEQVVGS

SEQ ID NO: 636 - protein, 21 aa, Artificial Sequence
  Description of Artificial Sequence: Synthetic peptide
FDAVHGFDGGFYGWFKRELQR

SEQ ID NO: 637 - protein, 21 aa, Artificial Sequence
  Description of Artificial Sequence: Synthetic peptide
QAGGMEFHGAFYNWFLQQLSG

SEQ ID NO: 638 - protein, 21 aa, Artificial Sequence
  Description of Artificial Sequence: Synthetic peptide
GRSVSRMNAEFYQWFGHQLAA

SEQ ID NO: 639 - protein, 21 aa, Artificial Sequence
  Description of Artificial Sequence: Synthetic peptide
AAVNSLFHDEFYLWFQDQLDG

SEQ ID NO: 640 - protein, 21 aa, Artificial Sequence
  Description of Artificial Sequence: Synthetic peptide
QLGMDWFHADFYEWFLAQLPS

SEQ ID NO: 641 - protein, 21 aa, Artificial Sequence
  Description of Artificial Sequence: Synthetic peptide
RLAGSGIHEGFYGWFVDQLLA

SEQ ID NO: 642 - protein, 21 aa, Artificial Sequence
  Description of Artificial Sequence: Synthetic peptide
GREIGGVHDGFYDWFRQQSEQ

SEQ ID NO: 643 - protein, 21 aa, Artificial Sequence
  Description of Artificial Sequence: Synthetic peptide
VRSEQRFDSSFYQWFNDLLMS

SEQ ID NO: 644 - protein, 21 aa, Artificial Sequence
  Description of Artificial Sequence: Synthetic peptide
QSPYGFFHDGFYRWFLQQTGM

SEQ ID NO: 645 - protein, 21 aa, Artificial Sequence
  Description of Artificial Sequence: Synthetic peptide
FQCGAAFHVDFYRWFTCQEQF

SEQ ID NO: 646 - protein, 21 aa, Artificial Sequence
  Description of Artificial Sequence: Synthetic peptide
GAFGSEFHEQFYRWFEDALSF

SEQ ID NO: 647 - protein, 21 aa, Artificial Sequence
  Description of Artificial Sequence: Synthetic peptide
EHTSYQIHRQFYEWFDRALGR

SEQ ID NO: 648 - protein, 21 aa, Artificial Sequence
  Description of Artificial Sequence: Synthetic peptide
SGTAADLHSRFYGWFALQARE

SEQ ID NO: 649 - protein, 21 aa, Artificial Sequence
  Description of Artificial Sequence: Synthetic peptide
EGFGVLFHGQFYRWFQLQLDG

SEQ ID NO: 650 - protein, 21 aa, Artificial Sequence
  Description of Artificial Sequence: Synthetic peptide
QQSAGHPHSSFYLWFSELLGA

SEQ ID NO: 651 - protein, 21 aa, Artificial Sequence
  Description of Artificial Sequence: Synthetic peptide
YLQRAGFHRSFYGWFDQALRD

SEQ ID NO: 652 - protein, 21 aa, Artificial Sequence
  Description of Artificial Sequence: Synthetic peptide
MWLWATLHSDFYSWFEQVVSG

SEQ ID NO: 653 - protein, 21 aa, Artificial Sequence
  Description of Artificial Sequence: Synthetic peptide
GANALGFKDRFYEWFAAQLWD

SEQ ID NO: 654 - protein, 21 aa, Artificial Sequence
  Description of Artificial Sequence: Synthetic peptide
GSGLYVFHWGFYDWFEQQMGG

SEQ ID NO: 655 - protein, 21 aa, Artificial Sequence
  Description of Artificial Sequence: Synthetic peptide
LDKGWGFDLQFYRWFEAATRA

SEQ ID NO: 656 - protein, 21 aa, Artificial Sequence
  Description of Artificial Sequence: Synthetic peptide
QRSAVEFHADFYDWFLRLLTP

SEQ ID NO: 657 - protein, 21 aa, Artificial Sequence
  Description of Artificial Sequence: Synthetic peptide
DQRMGSFHGEFYRWFEETLLS

SEQ ID NO: 658 - protein, 21 aa, Artificial Sequence
  Description of Artificial Sequence: Synthetic peptide
GRFYGWFQDAIDQLMPWGFDP

SEQ ID NO: 659 - protein, 21 aa, Artificial Sequence
  Description of Artificial Sequence: Synthetic peptide
IQGWEPFYGWFDDVVAQMFEE

SEQ ID NO: 660 - protein, 17 aa, Artificial Sequence
  Description of Artificial Sequence: Synthetic peptide
RYGRWGLAQQFYDWFDR

SEQ ID NO: 661 - protein, 17 aa, Artificial Sequence
  Description of Artificial Sequence: Synthetic peptide
RGRLGSLSTQFYNWFAE

SEQ ID NO: 662 - protein, 21 aa, Artificial Sequence
  Description of Artificial Sequence: Synthetic peptide
ASAYTPFYQWFADVVSEYMQQ

SEQ ID NO: 663 - protein, 21 aa, Artificial Sequence
  Description of Artificial Sequence: Synthetic peptide
PYRMEGTEKWNFYDWFVAQLQ

SEQ ID NO: 664 - protein, 21 aa, Artificial Sequence
  Description of Artificial Sequence: Synthetic peptide
SAVHFQFYKWFDNLLPVPLSA

SEQ ID NO: 665 - protein, 21 aa, Artificial Sequence
  Description of Artificial Sequence: Synthetic peptide
VPVNKSFYRWFQLVLGGSDDW

SEQ ID NO: 666 - protein, 21 aa, Artificial Sequence
  Description of Artificial Sequence: Synthetic peptide
QSPRASFYGWFDDVLRAAGVV

SEQ ID NO: 667 - protein, 21 aa, Artificial Sequence
  Description of Artificial Sequence: Synthetic peptide
TGFYEWFYEQLHSRMLPNPLD

SEQ ID NO: 668 - protein, 21 aa, Artificial Sequence
  Description of Artificial Sequence: Synthetic peptide
RRGVGGFYGWFSQQLQGMGVA

SEQ ID NO: 669 - protein, 21 aa, Artificial Sequence
  Description of Artificial Sequence: Synthetic peptide
SSQDRRFYRWFEQAIVGGRDG

SEQ ID NO: 670 - protein, 21 aa, Artificial Sequence
  Description of Artificial Sequence: Synthetic peptide
TRGQLGFYNWFQQALSTSGMG

SEQ ID NO: 671 - protein, 21 aa, Artificial Sequence
  Description of Artificial Sequence: Synthetic peptide
CADLNAFYQWFCGVLDRGSDH

SEQ ID NO: 672 - protein, 21 aa, Artificial Sequence
  Description of Artificial Sequence: Synthetic peptide
TLIQDQFYWWFSDLLSAEPGD

SEQ ID NO: 673 - protein, 21 aa, Artificial Sequence
  Description of Artificial Sequence: Synthetic peptide
IDQLDAFYRWFDGVMLGMGDP

SEQ ID NO: 674 - protein, 20 aa, Artificial Sequence
  Description of Artificial Sequence: Synthetic peptide
RGGGTFYEWFESALRKHGAG

SEQ ID NO: 675 - protein, 21 aa, Artificial Sequence
  Description of Artificial Sequence: Synthetic peptide
RGLDQDFYRWFQNLVGVEYDR

SEQ ID NO: 676 - protein, 21 aa, Artificial Sequence
  Description of Artificial Sequence: Synthetic peptide
MQGHRGFYGWFARVLEQDRGW

SEQ ID NO: 677 - protein, 21 aa, Artificial Sequence
  Description of Artificial Sequence: Synthetic peptide
ERLHLRFYEWFDTVIGQDGSD

SEQ ID NO: 678 - protein, 21 aa, Artificial Sequence
  Description of Artificial Sequence: Synthetic peptide
MHVQSDFYHWFQSLLGQGGPD

SEQ ID NO: 679 - protein, 21 aa, Artificial Sequence
  Description of Artificial Sequence: Synthetic peptide
TMGTQGFYRWFQNVVKEHLSG

SEQ ID NO: 680 - protein, 21 aa, Artificial Sequence
  Description of Artificial Sequence: Synthetic peptide
ITHNRGFYSWFLDVVQGGAGA

SEQ ID NO: 681 - protein, 21 aa, Artificial Sequence
  Description of Artificial Sequence: Synthetic peptide
VRRDAGFYQWFADILTQLDFE

SEQ ID NO: 682 - protein, 21 aa, Artificial Sequence
  Description of Artificial Sequence: Synthetic peptide
MQLQDEFYNWFRGIMLNDGQD

SEQ ID NO: 683 - protein, 21 aa, Artificial Sequence
  Description of Artificial Sequence: Synthetic peptide
GIRSSGFYQWFDRVLAGVGDG

SEQ ID NO: 684 - protein, 21 aa, Artificial Sequence
  Description of Artificial Sequence: Synthetic peptide
ANLNSQFYSWFASVTGEASPS

SEQ ID NO: 685 - protein, 21 aa, Artificial Sequence
  Description of Artificial Sequence: Synthetic peptide
QSPRASFYGWFDDVLRAAGVV

SEQ ID NO: 686 - protein, 21 aa, Artificial Sequence
  Description of Artificial Sequence: Synthetic peptide
MQRNQGFYSWFDDLVSSTVGV

SEQ ID NO: 687 - protein, 21 aa, Artificial Sequence
  Description of Artificial Sequence: Synthetic peptide
ASGFDPFYAWFLEQLRVANGS

SEQ ID NO: 688 - protein, 21 aa, Artificial Sequence
  Description of Artificial Sequence: Synthetic peptide
SGTPYGFYRWFQSALASATSG

SEQ ID NO: 689 - protein, 21 aa, Artificial Sequence
  Description of Artificial Sequence: Synthetic peptide
QGVEGGFYEWFDRAMGDVRPW

SEQ ID NO: 690 - protein, 21 aa, Artificial Sequence
  Description of Artificial Sequence: Synthetic peptide
DNMSGGFYRWFAQVVADSGGD

SEQ ID NO: 691 - protein, 21 aa, Artificial Sequence
  Description of Artificial Sequence: Synthetic peptide
RGTDDTFYGWFDQLLQGWCDD

SEQ ID NO: 692 - protein, 21 aa, Artificial Sequence
  Description of Artificial Sequence: Synthetic peptide
TVDHTQFYDWFSRVLGESGSA

SEQ ID NO: 693 - protein, 21 aa, Artificial Sequence
  Description of Artificial Sequence: Synthetic peptide
GRQDREFYYWFELQAGGMDGD

SEQ ID NO: 694 - protein, 21 aa, Artificial Sequence
  Description of Artificial Sequence: Synthetic peptide
RLLLGGFYEWFDQVLKETKEV

SEQ ID NO: 695 - protein, 21 aa, Artificial Sequence
  Description of Artificial Sequence: Synthetic peptide
GVLSTGFYEWFALQLHGLAAG

SEQ ID NO: 696 - protein, 21 aa, Artificial Sequence
  Description of Artificial Sequence: Synthetic peptide
PAVGQSFYGWFEAVLRGSKAG

SEQ ID NO: 697 - protein, 21 aa, Artificial Sequence
  Description of Artificial Sequence: Synthetic peptide
SNGISGFYEWFAAQVQTSDFQ

SEQ ID NO: 698 - protein, 21 aa, Artificial Sequence
  Description of Artificial Sequence: Synthetic peptide
LLGLSQAAYANFYDWFVSQLA

SEQ ID NO: 699 - protein, 21 aa, Artificial Sequence
  Description of Artificial Sequence: Synthetic peptide
VPNSWMFYNWFAEQIEGSEGE

SEQ ID NO: 700 - protein, 21 aa, Artificial Sequence
  Description of Artificial Sequence: Synthetic peptide
ARRADGFYDWFREQVSGSAVQ

SEQ ID NO: 701 - protein, 21 aa, Artificial Sequence
  Description of Artificial Sequence: Synthetic peptide
GVVEGTFYEWFDRLLGGVQGD

SEQ ID NO: 702 - protein, 21 aa, Artificial Sequence
  Description of Artificial Sequence: Synthetic peptide
SHLTDPFYQWFVDQLRAGVRG

SEQ ID NO: 703 - protein, 21 aa, Artificial Sequence
  Description of Artificial Sequence: Synthetic peptide
RSNDDAFYRWFSNILQVDGGG

SEQ ID NO: 704 - protein, 21 aa, Artificial Sequence
  Description of Artificial Sequence: Synthetic peptide
DSDGAQFYIWFEDQLRSAGWD

SEQ ID NO: 705 - protein, 21 aa, Artificial Sequence
  Description of Artificial Sequence: Synthetic peptide
PGLHRAFYQWFAEAVRSANKE

SEQ ID NO: 706 - protein, 20 aa, Artificial Sequence
  Description of Artificial Sequence: Synthetic peptide
SLGQGGFYDWFASQVGGADI

SEQ ID NO: 707 - protein, 21 aa, Artificial Sequence
  Description of Artificial Sequence: Synthetic peptide
CGQTQSFYQWFCEVMRVESGD

SEQ ID NO: 708 - protein, 21 aa, Artificial Sequence
  Description of Artificial Sequence: Synthetic peptide
IVVPGDTQGVNFYDWFVKQLQ

SEQ ID NO: 709 - protein, 21 aa, Artificial Sequence
  Description of Artificial Sequence: Synthetic peptide
RDVSMGSASTNFYDWFVQQLG

SEQ ID NO: 710 - protein, 21 aa, Artificial Sequence
  Description of Artificial Sequence: Synthetic peptide
SQAGSAFYAWFDQVLRTVHSA

SEQ ID NO: 711 - protein, 21 aa, Artificial Sequence
  Description of Artificial Sequence: Synthetic peptide
SNGISGFYEWFAAQVQTSDFQ

SEQ ID NO: 712 - protein, 17 aa, Artificial Sequence
  Description of Artificial Sequence: Synthetic peptide
RRDRGGLDVFFYQWFMD

SEQ ID NO: 713 - protein, 20 aa, Artificial Sequence
  Description of Artificial Sequence: Synthetic peptide
HLCVLEELFWGASLFGYCSG

SEQ ID NO: 714 - protein, 20 aa, Artificial Sequence
  Description of Artificial Sequence: Synthetic peptide
PLCVLEELFWSTPLFGQCSY

SEQ ID NO: 715 - protein, 20 aa, Artificial Sequence
  Description of Artificial Sequence: Synthetic peptide
HLCVLEELFWGASLFAQCVG

SEQ ID NO: 716 - protein, 20 aa, Artificial Sequence
  Description of Artificial Sequence: Synthetic peptide
DLCVLEELFWGASRFGQCSG

SEQ ID NO: 717 - protein, 20 aa, Artificial Sequence
  Description of Artificial Sequence: Synthetic peptide
HLCVLEELFWGASLFGQCAG

SEQ ID NO: 718 - protein, 20 aa, Artificial Sequence
  Description of Artificial Sequence: Synthetic peptide
HLCVVEELFWGASLFGQCSG

SEQ ID NO: 719 - protein, 20 aa, Artificial Sequence
  Description of Artificial Sequence: Synthetic peptide
NLCDLEVLFWGASLFRQCSG

SEQ ID NO: 720 - protein, 20 aa, Artificial Sequence
  Description of Artificial Sequence: Synthetic peptide
PLCVLEEQFWGASLFGQCSG

SEQ ID NO: 721 - protein, 20 aa, Artificial Sequence
  Description of Artificial Sequence: Synthetic peptide
QLCVLEELFWGASEFGQCSG

SEQ ID NO: 722 - protein, 20 aa, Artificial Sequence
  Description of Artificial Sequence: Synthetic peptide
HLCELEELFWGASLFGQCSG

SEQ ID NO: 723 - protein, 20 aa, Artificial Sequence
  Description of Artificial Sequence: Synthetic peptide
PLCVLEELFWGESLFGQCSG

SEQ ID NO: 724 - protein, 20 aa, Artificial Sequence
  Description of Artificial Sequence: Synthetic peptide
HLCVLEELFWGASRFGQCSG

SEQ ID NO: 725 - protein, 20 aa, Artificial Sequence
  Description of Artificial Sequence: Synthetic peptide
KLCVLEELFWGASLFGQCSG

SEQ ID NO: 726 - protein, 20 aa, Artificial Sequence
  Description of Artificial Sequence: Synthetic peptide
YLCVLEELSWGASLFGQCSG

SEQ ID NO: 727 - protein, 20 aa, Artificial Sequence
  Description of Artificial Sequence: Synthetic peptide
HLCVLEELLWGASLFAQCSG

SEQ ID NO: 728 - protein, 20 aa, Artificial Sequence
  Description of Artificial Sequence: Synthetic peptide
QLCVLEQLFWGESLFGQCSG

SEQ ID NO: 729 - protein, 20 aa, Artificial Sequence
  Description of Artificial Sequence: Synthetic peptide
HLCVLEELFWGGNLFSQCSG

SEQ ID NO: 730 - protein, 20 aa, Artificial Sequence
  Description of Artificial Sequence: Synthetic peptide
HLCVLEELFWGASLYGQCSG

SEQ ID NO: 731 - protein, 20 aa, Artificial Sequence
  Description of Artificial Sequence: Synthetic peptide
SLCALEEQFWGAALFGYCSG

SEQ ID NO: 732 - protein, 20 aa, Artificial Sequence
  Description of Artificial Sequence: Synthetic peptide
HLCVLEEQFWGASLFDGCAG

SEQ ID NO: 733 - protein, 20 aa, Artificial Sequence
  Description of Artificial Sequence: Synthetic peptide
QLCVLEELFWGASLFGQCSG

SEQ ID NO: 734 - protein, 20 aa, Artificial Sequence
  Description of Artificial Sequence: Synthetic peptide
PLCVLEELFWGAALFGQCSG

SEQ ID NO: 735 - protein, 20 aa, Artificial Sequence
  Description of Artificial Sequence: Synthetic peptide
HLCVLEELFWGASLFGQCTG

SEQ ID NO: 736 - protein, 20 aa, Artificial Sequence
  Description of Artificial Sequence: Synthetic peptide
PLCVLEELFWGGSLFGQCSG

SEQ ID NO: 737 - protein, 20 aa, Artificial Sequence
  Description of Artificial Sequence: Synthetic peptide
QLCVLEELVWGASLFGQCSG

SEQ ID NO: 738 - protein, 20 aa, Artificial Sequence
  Description of Artificial Sequence: Synthetic peptide
HLCVVEELIWGASLFGQCSR

SEQ ID NO: 739 - protein, 20 aa, Artificial Sequence
  Description of Artificial Sequence: Synthetic peptide
DLCVLEELFWGASLFGQCAG

SEQ ID NO: 740 - protein, 20 aa, Artificial Sequence
  Description of Artificial Sequence: Synthetic peptide
QLCVLEERFWGASLFGQCSG

SEQ ID NO: 741 - protein, 20 aa, Artificial Sequence
  Description of Artificial Sequence: Synthetic peptide
NLCVLEELFWGAALFGQCSG

SEQ ID NO: 742 - protein, 20 aa, Artificial Sequence
  Description of Artificial Sequence: Synthetic peptide
QLCVLEELFWGSSLFGQCSG

SEQ ID NO: 743 - protein, 20 aa, Artificial Sequence
  Description of Artificial Sequence: Synthetic peptide
DLCVVEELFWGKSLFGQCSG

SEQ ID NO: 744 - protein, 20 aa, Artificial Sequence
  Description of Artificial Sequence: Synthetic peptide
DLCVLEELFWGSSLFGQCSG

SEQ ID NO: 745 - protein, 20 aa, Artificial Sequence
  Description of Artificial Sequence: Synthetic peptide
YLCVLEEQFWGASLFRQCFG

SEQ ID NO: 746 - protein, 20 aa, Artificial Sequence
  Description of Artificial Sequence: Synthetic peptide
HLCVLEELLWGSSLFGQCSG

SEQ ID NO: 747 - protein, 20 aa, Artificial Sequence
  Description of Artificial Sequence: Synthetic peptide
PLCGLEELFWGASLFGQCSD

SEQ ID NO: 748 - protein, 20 aa, Artificial Sequence
  Description of Artificial Sequence: Synthetic peptide
HLCVLEELFWGSSLFAQCSG

SEQ ID NO: 749 - protein, 20 aa, Artificial Sequence
  Description of Artificial Sequence: Synthetic peptide
PLCAIEELFWGAALFGQCSG

SEQ ID NO: 750 - protein, 20 aa, Artificial Sequence
  Description of Artificial Sequence: Synthetic peptide
HLCVLEEQFWGASLFGDCSG

SEQ ID NO: 751 - protein, 20 aa, Artificial Sequence
  Description of Artificial Sequence: Synthetic peptide
PLCVLEELFWGAPLFGQCSD

SEQ ID NO: 752 - protein, 20 aa, Artificial Sequence
  Description of Artificial Sequence: Synthetic peptide
DLCGLEELFWGAALFGQCTS

SEQ ID NO: 753 - protein, 20 aa, Artificial Sequence
  Description of Artificial Sequence: Synthetic peptide
QLCVLEKQLWGASLFWQCSG

SEQ ID NO: 754 - protein, 20 aa, Artificial Sequence
  Description of Artificial Sequence: Synthetic peptide
HLCVLEELFWGASLYGQCPG

SEQ ID NO: 755 - protein, 20 aa, Artificial Sequence
  Description of Artificial Sequence: Synthetic peptide
HLCVLEELFWGASLFDQCSG

SEQ ID NO: 756 - protein, 20 aa, Artificial Sequence
  Description of Artificial Sequence: Synthetic peptide
HLCVLEELLWGASLFGQCSG

SEQ ID NO: 757 - protein, 20 aa, Artificial Sequence
  Description of Artificial Sequence: Synthetic peptide
PLCVLEELFWGVSLFGQCGG

SEQ ID NO: 758 - protein, 20 aa, Artificial Sequence
  Description of Artificial Sequence: Synthetic peptide
HLCVLEELFWGASQWGQCSG

SEQ ID NO: 759 - protein, 20 aa, Artificial Sequence
  Description of Artificial Sequence: Synthetic peptide
RLCVLEEQFWGGALFGQCSG

SEQ ID NO: 760 - protein, 20 aa, Artificial Sequence
  Description of Artificial Sequence: Synthetic peptide
QLCVLEELFWGVSLFAQCSG

SEQ ID NO: 761 - protein, 20 aa, Artificial Sequence
  Description of Artificial Sequence: Synthetic peptide
HLCVLEELFWGAALFGQCFG

SEQ ID NO: 762 - protein, 20 aa, Artificial Sequence
  Description of Artificial Sequence: Synthetic peptide
YLCVLEELFWGASQFGQCSG

SEQ ID NO: 763 - protein, 20 aa, Artificial Sequence
  Description of Artificial Sequence: Synthetic peptide
HLCVLEELYWGASLFGQCSG

SEQ ID NO: 764 - protein, 20 aa, Artificial Sequence
  Description of Artificial Sequence: Synthetic peptide
HLCVLEERFWGVSLFGQCSG

SEQ ID NO: 765 - protein, 20 aa, Artificial Sequence
  Description of Artificial Sequence: Synthetic peptide
PLCVLEELFWGASRFGQCSG

SEQ ID NO: 766 - protein, 20 aa, Artificial Sequence
  Description of Artificial Sequence: Synthetic peptide
HLCVLEDLFWGASLFDQCSG

SEQ ID NO: 767 - protein, 20 aa, Artificial Sequence
  Description of Artificial Sequence: Synthetic peptide
HLCDLEVLFWGASLFGQCSG

SEQ ID NO: 768 - protein, 20 aa, Artificial Sequence
  Description of Artificial Sequence: Synthetic peptide
QLCILEEQFWGTSLFGYCSG

SEQ ID NO: 769 - protein, 20 aa, Artificial Sequence
  Description of Artificial Sequence: Synthetic peptide
ALCVLEELFWGESLFGQCSG

SEQ ID NO: 770 - protein, 20 aa, Artificial Sequence
  Description of Artificial Sequence: Synthetic peptide
RLCVLEERFWGAALFGQCSG

SEQ ID NO: 771 - protein, 20 aa, Artificial Sequence
  Description of Artificial Sequence: Synthetic peptide
PLCVLEELFWGASLFGQCSG

SEQ ID NO: 772 - protein, 20 aa, Artificial Sequence
  Description of Artificial Sequence: Synthetic peptide
SLCVLEELFWGGSRFGQCSG

SEQ ID NO: 773 - protein, 20 aa, Artificial Sequence
  Description of Artificial Sequence: Synthetic peptide
HLCLLEEQFWGASLFGYCFE

SEQ ID NO: 774 - protein, 20 aa, Artificial Sequence
  Description of Artificial Sequence: Synthetic peptide
HLCVLEEQFWGASLFGQCSG

SEQ ID NO: 775 - protein, 20 aa, Artificial Sequence
  Description of Artificial Sequence: Synthetic peptide
DLCLLEELLWGASRFGQCSG

SEQ ID NO: 776 - protein, 20 aa, Artificial Sequence
  Description of Artificial Sequence: Synthetic peptide
YLCVLEERFWGASLFGQCSG

SEQ ID NO: 777 - protein, 20 aa, Artificial Sequence
  Description of Artificial Sequence: Synthetic peptide
HLCVLEEQFWGASLFGSCSG

SEQ ID NO: 778 - protein, 20 aa, Artificial Sequence
  Description of Artificial Sequence: Synthetic peptide
QLCVLEEQLWGASLFGQCSG

SEQ ID NO: 779 - protein, 20 aa, Artificial Sequence
  Description of Artificial Sequence: Synthetic peptide
  MOD_RES (10): Unknown amino acid; translation read-through at TGA stop codon
HLCVLEELFXGESLFGYCSG

SEQ ID NO: 780 - protein, 20 aa, Artificial Sequence
  Description of Artificial Sequence: Synthetic peptide
HLCVLEELFWGASLFGQCSG

SEQ ID NO: 781 - protein, 20 aa, Artificial Sequence
  Description of Artificial Sequence: Synthetic peptide
PLCVLEELFWGASHFGQCSG

SEQ ID NO: 782 - protein, 20 aa, Artificial Sequence
  Description of Artificial Sequence: Synthetic peptide
HLCVLEELVWGASLFGQCAG

SEQ ID NO: 783 - protein, 20 aa, Artificial Sequence
  Description of Artificial Sequence: Synthetic peptide
QLCVLEELIWGASLFGQCAG

SEQ ID NO: 784 - protein, 20 aa, Artificial Sequence
  Description of Artificial Sequence: Synthetic peptide
HLCGLEELFWGASLFGQCSG

SEQ ID NO: 785 - protein, 20 aa, Artificial Sequence
  Description of Artificial Sequence: Synthetic peptide
HLCVLEELVWGESLFGQCSG

SEQ ID NO: 786 - protein, 20 aa, Artificial Sequence
  Description of Artificial Sequence: Synthetic peptide
RLCVLEELYWGASLFGQCSG

SEQ ID NO: 787 - protein, 20 aa, Artificial Sequence
  Description of Artificial Sequence: Synthetic peptide
RLCILEELFWGASLFGQCSG

SEQ ID NO: 788 - protein, 20 aa, Artificial Sequence
  Description of Artificial Sequence: Synthetic peptide
HLCVLEELFWGATLFDQCSG

SEQ ID NO: 789 - protein, 20 aa, Artificial Sequence
  Description of Artificial Sequence: Synthetic peptide
HLCFLEELFWGASMFGQCSG

SEQ ID NO: 790 - protein, 20 aa, Artificial Sequence
  Description of Artificial Sequence: Synthetic peptide
HLCIVEELFWAAPLFGQCSG

SEQ ID NO: 791 - protein, 20 aa, Artificial Sequence
  Description of Artificial Sequence: Synthetic peptide
HLCVLEELWWGASLFAQCSA

SEQ ID NO: 792 - protein, 20 aa, Artificial Sequence
  Description of Artificial Sequence: Synthetic peptide
NLCALEELFWGASQFRYCPG

SEQ ID NO: 793 - protein, 20 aa, Artificial Sequence
  Description of Artificial Sequence: Synthetic peptide
RLCVLEELFWGASLFGQCSG

SEQ ID NO: 794 - protein, 20 aa, Artificial Sequence
  Description of Artificial Sequence: Synthetic peptide
PLCVLEELFWGASLFGQCPG

SEQ ID NO: 795 - protein, 20 aa, Artificial Sequence
  Description of Artificial Sequence: Synthetic peptide
NLCVLEELFWGASLFGQCSG

SEQ ID NO: 796 - protein, 20 aa, Artificial Sequence
  Description of Artificial Sequence: Synthetic peptide
  MOD_RES (7): Unknown amino acid; translation read-through at TAA stop codon
QLCVLGXRFWGGSLCGYCSD

SEQ ID NO: 797 - protein, 20 aa, Artificial Sequence
  Description of Artificial Sequence: Synthetic peptide
PLCFLQELFGGASLGGYCSG

SEQ ID NO: 798 - protein, 20 aa, Artificial Sequence
  Description of Artificial Sequence: Synthetic peptide
FMCGLQELVGGAALLGHCSG

SEQ ID NO: 799 - protein, 20 aa, Artificial Sequence
  Description of Artificial Sequence: Synthetic peptide
PLCFLQELFGGGSLSGYCSG

SEQ ID NO: 800 - protein, 20 aa, Artificial Sequence
  Description of Artificial Sequence: Synthetic peptide
FLCGLEELAWGVSRSGYCFG

SEQ ID NO: 801 - protein, 20 aa, Artificial Sequence
  Description of Artificial Sequence: Synthetic peptide
PLCFLAELFSGSALGGDCSR

SEQ ID NO: 802 - protein, 20 aa, Artificial Sequence
  Description of Artificial Sequence: Synthetic peptide
PLCVLQELFGGGSLGGYCSG

SEQ ID NO: 803 - protein, 20 aa, Artificial Sequence
  Description of Artificial Sequence: Synthetic peptide
  MOD_RES (7): Unknown amino acid; translation read-through at TAA stop codon
QLCVLEXLFWGACLFGYCAG

SEQ ID NO: 804 - protein, 20 aa, Artificial Sequence
  Description of Artificial Sequence: Synthetic peptide
FLCGLQELSGVASLFGQCSG

SEQ ID NO: 805 - protein, 20 aa, Artificial Sequence
  Description of Artificial Sequence: Synthetic peptide
  MOD_RES (18): Unknown amino acid; translation read-through at TGA stop codon
RVCVLEQLVWGASLFGAXSG

SEQ ID NO: 806 - protein, 20 aa, Artificial Sequence
  Description of Artificial Sequence: Synthetic peptide
FYCGLEELSWGAALFGYCSG

SEQ ID NO: 807 - protein, 20 aa, Artificial Sequence
  Description of Artificial Sequence: Synthetic peptide
FLCGLEELSQGAVLFGHCYG

SEQ ID NO: 808 - protein, 20 aa, Artificial Sequence
  Description of Artificial Sequence: Synthetic peptide
HLCVLVGLFWDASLFGQCSG

SEQ ID NO: 809 - protein, 20 aa, Artificial Sequence
  Description of Artificial Sequence: Synthetic peptide
QRCIRAALFWCATLLGGCAG

SEQ ID NO: 810 - protein, 20 aa, Artificial Sequence
  Description of Artificial Sequence: Synthetic peptide
HQCIPDGMSQGAALRGNCSD

SEQ ID NO: 811 - protein, 20 aa, Artificial Sequence
  Description of Artificial Sequence: Synthetic peptide
HLCVLEDELWGVSLFGYCSS

SEQ ID NO: 812 - protein, 20 aa, Artificial Sequence
  Description of Artificial Sequence: Synthetic peptide
HLCMLEEQFWGASLFSRCSG

SEQ ID NO: 813 - protein, 20 aa, Artificial Sequence
  Description of Artificial Sequence: Synthetic peptide
TCAFWKNGSGVRRCSVTAVV

SEQ ID NO: 814 - protein, 20 aa, Artificial Sequence
  Description of Artificial Sequence: Synthetic peptide
  MOD_RES (8): Unknown amino acid
PLCGLKNXSGVRLCSSPALV

SEQ ID NO: 815 - protein, 20 aa, Artificial Sequence
  Description of Artificial Sequence: Synthetic peptide
PLCLQEELFWGASLFGYCSG

SEQ ID NO: 816 - protein, 20 aa, Artificial Sequence
  Description of Artificial Sequence: Synthetic peptide
PLCDLEELFWGASLFGDCPG

SEQ ID NO: 817 - protein, 20 aa, Artificial Sequence
  Description of Artificial Sequence: Synthetic peptide
DLCVLEELFWDGSLFASCSG

SEQ ID NO: 818 - protein, 20 aa, Artificial Sequence
  Description of Artificial Sequence: Synthetic peptide
PLCVLEEQLWGTALFGSCTG

SEQ ID NO: 819 - protein, 20 aa, Artificial Sequence
  Description of Artificial Sequence: Synthetic peptide
PLCLVEELLWGASLFSQCTG

SEQ ID NO: 820 - protein, 20 aa, Artificial Sequence
  Description of Artificial Sequence: Synthetic peptide
PLCDLEELYWGAALFGSCSG

SEQ ID NO: 821 - protein, 20 aa, Artificial Sequence
  Description of Artificial Sequence: Synthetic peptide
GLCFLEEQFWGTSLFRDCPG

SEQ ID NO: 822 - protein, 20 aa, Artificial Sequence
  Description of Artificial Sequence: Synthetic peptide
PLCVVEELFWGASLYGQCSG

SEQ ID NO: 823 - protein, 20 aa, Artificial Sequence
  Description of Artificial Sequence: Synthetic peptide
RLCVLEELFWGASRFRGCSG

SEQ ID NO: 824 - protein, 20 aa, Artificial Sequence
  Description of Artificial Sequence: Synthetic peptide
PLCVLEELHWGAALFGYCSG

SEQ ID NO: 825 - protein, 20 aa, Artificial Sequence
  Description of Artificial Sequence: Synthetic peptide
NLCVVEELFWGASLFPNCSG

SEQ ID NO: 826 - protein, 20 aa, Artificial Sequence
  Description of Artificial Sequence: Synthetic peptide
QLCVLEELFWGASMFEDCSG

SEQ ID NO: 827 - protein, 20 aa, Artificial Sequence
  Description of Artificial Sequence: Synthetic peptide
HLCVLEEQFWGASLFGQCSG

SEQ ID NO: 828 - protein, 20 aa, Artificial Sequence
  Description of Artificial Sequence: Synthetic peptide
PLCVLEEIYWGAALFGDCYG

SEQ ID NO: 829 - protein, 19 aa, Artificial Sequence
  Description of Artificial Sequence: Synthetic peptide
PLCVLEELFWGLSLDKNCS

SEQ ID NO: 830 - protein, 20 aa, Artificial Sequence
  Description of Artificial Sequence: Synthetic peptide
QLCVLEELFWGASLFSGCSG

SEQ ID NO: 831 - protein, 20 aa, Artificial Sequence
  Description of Artificial Sequence: Synthetic peptide
PLCDLEALFWGESLFGGCSG

SEQ ID NO: 832 - protein, 20 aa, Artificial Sequence
  Description of Artificial Sequence: Synthetic peptide
HLCVLEEMFWGTSHFDGCSG

SEQ ID NO: 833 - protein, 20 aa, Artificial Sequence
  Description of Artificial Sequence: Synthetic peptide
DLCVLEELFWGAPLFGLCSG

SEQ ID NO: 834 - protein, 20 aa, Artificial Sequence
  Description of Artificial Sequence: Synthetic peptide
DLCVLEELFWGVALYGGCSG

SEQ ID NO: 835 - protein, 20 aa, Artificial Sequence
  Description of Artificial Sequence: Synthetic peptide
QLCVLEELYWGASLFGHCSG

SEQ ID NO: 836 - protein, 20 aa, Artificial Sequence
  Description of Artificial Sequence: Synthetic peptide
HLCVLEDRFWGASLFGPCSG

SEQ ID NO: 837 - protein, 20 aa, Artificial Sequence
  Description of Artificial Sequence: Synthetic peptide
HLCGMEEMFWGVALFRNCSG

SEQ ID NO: 838 - protein, 20 aa, Artificial Sequence
  Description of Artificial Sequence: Synthetic peptide
PLCVLEQLYWGESLFVYCSG

SEQ ID NO: 839 - protein, 20 aa, Artificial Sequence
  Description of Artificial Sequence: Synthetic peptide
HLCLLEELFWGEALWGYCSG

SEQ ID NO: 840 - protein, 20 aa, Artificial Sequence
  Description of Artificial Sequence: Synthetic peptide
QLCVMEELFWGASRFGQCSG

SEQ ID NO: 841 - protein, 20 aa, Artificial Sequence
  Description of Artificial Sequence: Synthetic peptide
HLCVLEELFWGASMFGQCSG

SEQ ID NO: 842 - protein, 20 aa, Artificial Sequence
  Description of Artificial Sequence: Synthetic peptide
QLCVLEEMFWGGSRFVQCSA

SEQ ID NO: 843 - protein, 20 aa, Artificial Sequence
  Description of Artificial Sequence: Synthetic peptide
PLCILEELFWGEALFDQCGA

SEQ ID NO: 844 - protein, 20 aa, Artificial Sequence
  Description of Artificial Sequence: Synthetic peptide
YLCVQEELFWGASLFGYCSV

SEQ ID NO: 845 - protein, 20 aa, Artificial Sequence
  Description of Artificial Sequence: Synthetic peptide
HLCALEEAFFGPSLFNSCQG

SEQ ID NO: 846 - protein, 20 aa, Artificial Sequence
  Description of Artificial Sequence: Synthetic peptide
HLCVLEERFWGASLFGQCSG

SEQ ID NO: 847 - protein, 20 aa, Artificial Sequence
  Description of Artificial Sequence: Synthetic peptide
QLCDLEELFWGASLFGYCPG

SEQ ID NO: 848 - protein, 20 aa, Artificial Sequence
  Description of Artificial Sequence: Synthetic peptide
HLCVLEERFWGASIWGSCSG

SEQ ID NO: 849 - protein, 20 aa, Artificial Sequence
  Description of Artificial Sequence: Synthetic peptide
QLCVLEELFWGGSLWGQCSR

SEQ ID NO: 850 - protein, 20 aa, Artificial Sequence
  Description of Artificial Sequence: Synthetic peptide
PLCVLEELFWGAAQFGQCSG

SEQ ID NO: 851 - protein, 20 aa, Artificial Sequence
  Description of Artificial Sequence: Synthetic peptide
QLCDLEERFWGVSLFGLCSG

SEQ ID NO: 852 - protein, 20 aa, Artificial Sequence
  Description of Artificial Sequence: Synthetic peptide
QLCVLEEVFWGASLFGLCTG

SEQ ID NO: 853 - protein, 20 aa, Artificial Sequence
  Description of Artificial Sequence: Synthetic peptide
  MOD_RES (3): Unknown amino acid
QLXDLNTWSGLCLCSVTVRV

SEQ ID NO: 854 - protein, 20 aa, Artificial Sequence
  Description of Artificial Sequence: Synthetic peptide
DLCVLEESLWGKALFGYCSD

SEQ ID NO: 855 - protein, 20 aa, Artificial Sequence
  Description of Artificial Sequence: Synthetic peptide
HLCVLEEVFWGSSMFGDCSG

SEQ ID NO: 856 - protein, 20 aa, Artificial Sequence
  Description of Artificial Sequence: Synthetic peptide
HLCDLEELFWGASLFGDCQG

SEQ ID NO: 857 - protein, 20 aa, Artificial Sequence
  Description of Artificial Sequence: Synthetic peptide
QLCVLDALMWGGCRLGHQCG

SEQ ID NO: 858 - protein, 20 aa, Artificial Sequence
  Description of Artificial Sequence: Synthetic peptide
QLCVLEEKFWGTSLFGDCMG

SEQ ID NO: 859 - protein, 20 aa, Artificial Sequence
  Description of Artificial Sequence: Synthetic peptide
HLCVLEEVFWGAAQFGSCSG

SEQ ID NO: 860 - protein, 20 aa, Artificial Sequence
  Description of Artificial Sequence: Synthetic peptide
QLCVLEELFWGPSMFGYCSG

SEQ ID NO: 861 - protein, 20 aa, Artificial Sequence
  Description of Artificial Sequence: Synthetic peptide
HLCDLEELFWGASGFAQCYG

SEQ ID NO: 862 - protein, 20 aa, Artificial Sequence
  Description of Artificial Sequence: Synthetic peptide
DLCVLEERFWGASLFGQCSG

SEQ ID NO: 863 - protein, 20 aa, Artificial Sequence
  Description of Artificial Sequence: Synthetic peptide
QLCVLEELHWGASLFGYCSG

SEQ ID NO: 864 - protein, 20 aa, Artificial Sequence
  Description of Artificial Sequence: Synthetic peptide
PLCVLEEQFWGASLFGQCSG

SEQ ID NO: 865 - protein, 20 aa, Artificial Sequence
  Description of Artificial Sequence: Synthetic peptide
YLCDLEERFWGASLFGQCSS

SEQ ID NO: 866 - protein, 20 aa, Artificial Sequence
  Description of Artificial Sequence: Synthetic peptide
HLCLLEERFWGSSQFGFCSG

SEQ ID NO: 867 - protein, 20 aa, Artificial Sequence
  Description of Artificial Sequence: Synthetic peptide
HLCVLEELFWGASQFGQCSG

SEQ ID NO: 868 - protein, 20 aa, Artificial Sequence
  Description of Artificial Sequence: Synthetic peptide
HLCYLEERFWGASLFGQCSG

SEQ ID NO: 869 - protein, 20 aa, Artificial Sequence
  Description of Artificial Sequence: Synthetic peptide
HLCVMEELFWGTSLFGQCTG

SEQ ID NO: 870 - protein, 20 aa, Artificial Sequence
  Description of Artificial Sequence: Synthetic peptide
HLCVLEERFWGASLFGQCSG

SEQ ID NO: 871 - protein, 20 aa, Artificial Sequence
  Description of Artificial Sequence: Synthetic peptide
HLCVLEERFWGASLFSQCSG

SEQ ID NO: 872 - protein, 20 aa, Artificial Sequence
  Description of Artificial Sequence: Synthetic peptide
HLCVLEELFWGASLFGQCSG

SEQ ID NO: 873 - protein, 20 aa, Artificial Sequence
  Description of Artificial Sequence: Synthetic peptide
QLCLLEELFWGAASFGQCSG

SEQ ID NO: 874 - protein, 20 aa, Artificial Sequence
  Description of Artificial Sequence: Synthetic peptide
HLCVLEEMFWGASLFGQCSG

SEQ ID NO: 875 - protein, 20 aa, Artificial Sequence
  Description of Artificial Sequence: Synthetic peptide
HLCDLEELFWGASLFSQCSR

SEQ ID NO: 876 - protein, 20 aa, Artificial Sequence
  Description of Artificial Sequence: Synthetic peptide
QLCVLEELFWGASQFGYCSG

SEQ ID NO: 877 - protein, 20 aa, Artificial Sequence
  Description of Artificial Sequence: Synthetic peptide
QLCALEEQFWGASLFSQCSG

SEQ ID NO: 878 - protein, 20 aa, Artificial Sequence
  Description of Artificial Sequence: Synthetic peptide
QLCVLEELFWGASLFGYCSG

SEQ ID NO: 879 - protein, 20 aa, Artificial Sequence
  Description of Artificial Sequence: Synthetic peptide
HLCVLEEWFWGDSLFGQCSR

SEQ ID NO: 880 - protein, 20 aa, Artificial Sequence
  Description of Artificial Sequence: Synthetic peptide
HLCVLEERFWGASLFGQCSG

SEQ ID NO: 881 - protein, 20 aa, Artificial Sequence
  Description of Artificial Sequence: Synthetic peptide
QLCELEEVFWGASLFDYCSG

SEQ ID NO: 882 - protein, 20 aa, Artificial Sequence
  Description of Artificial Sequence: Synthetic peptide
HLCVLEELFWGASRFGQCSG

SEQ ID NO: 883 - protein, 20 aa, Artificial Sequence
  Description of Artificial Sequence: Synthetic peptide
HLCVLEELFWGASLFGQCSA

SEQ ID NO: 884 - protein, 20 aa, Artificial Sequence
  Description of Artificial Sequence: Synthetic peptide
HLCVLEELIWGASRFGQCSG

SEQ ID NO: 885 - protein, 20 aa, Artificial Sequence
  Description of Artificial Sequence: Synthetic peptide
HLCVLEELFWGGSLFIQCSG

SEQ ID NO: 886 - protein, 20 aa, Artificial Sequence
  Description of Artificial Sequence: Synthetic peptide
QLCVLEEQFWGASLFGNCSG

SEQ ID NO: 887 - protein, 20 aa, Artificial Sequence
  Description of Artificial Sequence: Synthetic peptide
HLCVLEERFWGAALFGQCSG

SEQ ID NO: 888 - protein, 20 aa, Artificial Sequence
  Description of Artificial Sequence: Synthetic peptide
HLCILEEMFWGASLFGQCGG

SEQ ID NO: 889 - protein, 20 aa, Artificial Sequence
  Description of Artificial Sequence: Synthetic peptide
PLCVLEELVWGASLFVQCSG

SEQ ID NO: 890 - protein, 20 aa, Artificial Sequence
  Description of Artificial Sequence: Synthetic peptide
NLCVLEELFWGESLFGQCSG

SEQ ID NO: 891 - protein, 20 aa, Artificial Sequence
  Description of Artificial Sequence: Synthetic peptide
HLCVLEEQFWGGSLFGYCSR

SEQ ID NO: 892 - protein, 20 aa, Artificial Sequence
  Description of Artificial Sequence: Synthetic peptide
HLCFLEEVFWGAALFAQCSG

SEQ ID NO: 893 - protein, 20 aa, Artificial Sequence
  Description of Artificial Sequence: Synthetic peptide
HLCDLEVLFWGSALFGQCSG

SEQ ID NO: 894 - protein, 20 aa, Artificial Sequence
  Description of Artificial Sequence: Synthetic peptide
HLCVMEELFWGASLFGQCSG

SEQ ID NO: 895 - protein, 20 aa, Artificial Sequence
  Description of Artificial Sequence: Synthetic peptide
HLCVLEERFWGASLFWQCSG

SEQ ID NO: 896 - protein, 20 aa, Artificial Sequence
  Description of Artificial Sequence: Synthetic peptide
HLCVLEEQYWGESLFGYCSG

SEQ ID NO: 897 - protein, 20 aa, Artificial Sequence
  Description of Artificial Sequence: Synthetic peptide
PLCVLEEQFWGASLFAYCSS

SEQ ID NO: 898 - protein, 20 aa, Artificial Sequence
  Description of Artificial Sequence: Synthetic peptide
QLCVLEELFWGESLFAQCLG

SEQ ID NO: 899 - protein, 20 aa, Artificial Sequence
  Description of Artificial Sequence: Synthetic peptide
HLCVLEELFWGQSLFGHCSD

SEQ ID NO: 900 - protein, 20 aa, Artificial Sequence
  Description of Artificial Sequence: Synthetic peptide
HLCVLEELVWGASLFGFCSG

SEQ ID NO: 901 - protein, 20 aa, Artificial Sequence
  Description of Artificial Sequence: Synthetic peptide
LLCVLEEQFWGASLFGQCSG

SEQ ID NO: 902 - protein, 20 aa, Artificial Sequence
  Description of Artificial Sequence: Synthetic peptide
RLCVLEELFWGESLFGQCSG

SEQ ID NO: 903 - protein, 20 aa, Artificial Sequence
  Description of Artificial Sequence: Synthetic peptide
HLCVLEEMFWGASLFGNCSG

SEQ ID NO: 904 - protein, 20 aa, Artificial Sequence
  Description of Artificial Sequence: Synthetic peptide
ELCFLEELFWGASLFGQCSG

SEQ ID NO: 905 - protein, 20 aa, Artificial Sequence
  Description of Artificial Sequence: Synthetic peptide
HLCVLEELFWGASLYGQCSS

SEQ ID NO: 906 - protein, 20 aa, Artificial Sequence
  Description of Artificial Sequence: Synthetic peptide
HLCVLEELFWGASLFAQCPG

SEQ ID NO: 907 - protein, 20 aa, Artificial Sequence
  Description of Artificial Sequence: Synthetic peptide
NLCVLEELFWGASEFGQCSG

SEQ ID NO: 908 - protein, 20 aa, Artificial Sequence
  Description of Artificial Sequence: Synthetic peptide
DLCVLEEQLWGASLFRYCSG

SEQ ID NO: 909 - protein, 20 aa, Artificial Sequence
  Description of Artificial Sequence: Synthetic peptide
HLCVLEEQFWGVALFGNCSG

SEQ ID NO: 910 - protein, 20 aa, Artificial Sequence
  Description of Artificial Sequence: Synthetic peptide
HLCVLEVQIWGASLFGQCSG

SEQ ID NO: 911 - protein, 20 aa, Artificial Sequence
  Description of Artificial Sequence: Synthetic peptide
HLCVLEERFWGGALFGQCTA

SEQ ID NO: 912 - protein, 20 aa, Artificial Sequence
  Description of Artificial Sequence: Synthetic peptide
HLCDLEELFWGASLFGQCSG

SEQ ID NO: 913 - protein, 20 aa, Artificial Sequence
  Description of Artificial Sequence: Synthetic peptide
QLCVLEELFWGTSLFAGCSG

SEQ ID NO: 914 - protein, 20 aa, Artificial Sequence
  Description of Artificial Sequence: Synthetic peptide
QLCGLEELFWGASLFGYCSA

SEQ ID NO: 915 - protein, 20 aa, Artificial Sequence
  Description of Artificial Sequence: Synthetic peptide
HLCVLEELFWGASLFGQCSS

SEQ ID NO: 916 - protein, 20 aa, Artificial Sequence
  Description of Artificial Sequence: Synthetic peptide
FLCVLEELYWGASQFGQCSG

SEQ ID NO: 917 - protein, 20 aa, Artificial Sequence
  Description of Artificial Sequence: Synthetic peptide
HLCVLEEQFWGASLFGYCSG

SEQ ID NO: 918 - protein, 20 aa, Artificial Sequence
  Description of Artificial Sequence: Synthetic peptide
RLCALEELFWGASLFGQCSG

SEQ ID NO: 919 - protein, 20 aa, Artificial Sequence
  Description of Artificial Sequence: Synthetic peptide
HLCVLEELFWGAALFHQCSG

SEQ ID NO: 920 - protein, 20 aa, Artificial Sequence
  Description of Artificial Sequence: Synthetic peptide
RLCVLEEQFWGASLFGQCSG

SEQ ID NO: 921 - protein, 20 aa, Artificial Sequence
  Description of Artificial Sequence: Synthetic peptide
QLCVLEELFWGSSRLGYCSG

SEQ ID NO: 922 - protein, 20 aa, Artificial Sequence
  Description of Artificial Sequence: Synthetic peptide
DLCVLEELFWGASLFGQCSG

SEQ ID NO: 923 - protein, 20 aa, Artificial Sequence
  Description of Artificial Sequence: Synthetic peptide
QLCLLEEQFWGGSLFGQCSG

SEQ ID NO: 924 - protein, 20 aa, Artificial Sequence
  Description of Artificial Sequence: Synthetic peptide
HLCVLEELFWGTSLFGQCSG

SEQ ID NO: 925 - protein, 20 aa, Artificial Sequence
  Description of Artificial Sequence: Synthetic peptide
RLCVLEELVWGASLFDQCSR

SEQ ID NO: 926 - protein, 20 aa, Artificial Sequence
  Description of Artificial Sequence: Synthetic peptide
EIEAEWGRVRCLVYGRCVGG

SEQ ID NO: 927 - protein, 20 aa, Artificial Sequence
  Description of Artificial Sequence: Synthetic peptide
EIEAEWGRVRCLVYGRCVGG

SEQ ID NO: 928 - protein, 20 aa, Artificial Sequence
  Description of Artificial Sequence: Synthetic peptide
WLDQEWAWVQCEVYGRGCPS

SEQ ID NO: 929 - protein, 20 aa, Artificial Sequence
  Description of Artificial Sequence: Synthetic peptide
WLDQEWAWVQCEVYGRGCPS

SEQ ID NO: 930 - protein, 20 aa, Artificial Sequence
  Description of Artificial Sequence: Synthetic peptide
WLDLEWAQVQCEVYGRGCPS

SEQ ID NO: 931 - protein, 20 aa, Artificial Sequence
  Description of Artificial Sequence: Synthetic peptide
WLDQEWAQVQCEVFGRGCPS

SEQ ID NO: 932 - protein, 20 aa, Artificial Sequence
  Description of Artificial Sequence: Synthetic peptide
WLDQEWQQVQCQVYGRGCTS

SEQ ID NO: 933 - protein, 20 aa, Artificial Sequence
  Description of Artificial Sequence: Synthetic peptide
RLDEEWARVQCEVWGRGCRS

SEQ ID NO: 934 - protein, 20 aa, Artificial Sequence
  Description of Artificial Sequence: Synthetic peptide
WLEQEWAWIQCEVYGRGCPS

SEQ ID NO: 935 - protein, 20 aa, Artificial Sequence
  Description of Artificial Sequence: Synthetic peptide
WLEQEWAQVQCEVYGRGCPS

SEQ ID NO: 936 - protein, 20 aa, Artificial Sequence
  Description of Artificial Sequence: Synthetic peptide
WLDEEWEWIQCKVYGRGCPA

SEQ ID NO: 937 - protein, 20 aa, Artificial Sequence
  Description of Artificial Sequence: Synthetic peptide
WLEQEWAWVQCEVYGRGCQS

SEQ ID NO: 938 - protein, 20 aa, Artificial Sequence
  Description of Artificial Sequence: Synthetic peptide
WLDQEWAWIQCEVYGRGCPA

SEQ ID NO: 939 - protein, 20 aa, Artificial Sequence
  Description of Artificial Sequence: Synthetic peptide
SLDWEWAWLQCEVYGRGCPS

SEQ ID NO: 940 - protein, 20 aa, Artificial Sequence
  Description of Artificial Sequence: Synthetic peptide
WLEQEWEQVRCLVYGRGCPP

SEQ ID NO: 941 - protein, 20 aa, Artificial Sequence
  Description of Artificial Sequence: Synthetic peptide
WLDQEWAWVQCEVYGRGCPY

SEQ ID NO: 942 - protein, 20 aa, Artificial Sequence
  Description of Artificial Sequence: Synthetic peptide
WLDQEWAGVLCEVYGRGCPS

SEQ ID NO: 943 - protein, 20 aa, Artificial Sequence
  Description of Artificial Sequence: Synthetic peptide
SLDKEWEWVLCVVYGRGCPS

SEQ ID NO: 944 - protein, 20 aa, Artificial Sequence
  Description of Artificial Sequence: Synthetic peptide
WLEQEWAQVQCEVYGRGCRS

SEQ ID NO: 945 - protein, 20 aa, Artificial Sequence
  Description of Artificial Sequence: Synthetic peptide
WLEEEWAQVQCAVYGRGCSS

SEQ ID NO: 946 - protein, 20 aa, Artificial Sequence
  Description of Artificial Sequence: Synthetic peptide
WLDQEWALVQCEVYGRGCPS

SEQ ID NO: 947 - protein, 20 aa, Artificial Sequence
  Description of Artificial Sequence: Synthetic peptide
WLDQEWAWVQCEVYGRGCPS

SEQ ID NO: 948 - protein, 20 aa, Artificial Sequence
  Description of Artificial Sequence: Synthetic peptide
WLEQEWAWVQCEVYGRGCAS

SEQ ID NO: 949 - protein, 20 aa, Artificial Sequence
  Description of Artificial Sequence: Synthetic peptide
WLDQEWAWVECEVYGRRCPS

SEQ ID NO: 950 - protein, 20 aa, Artificial Sequence
  Description of Artificial Sequence: Synthetic peptide
WLDQEWAWVECQVYGRGCPS

SEQ ID NO: 951 - protein, 20 aa, Artificial Sequence
  Description of Artificial Sequence: Synthetic peptide
QLDQEWAWVLCKVYGRGCPS

SEQ ID NO: 952 - protein, 20 aa, Artificial Sequence
  Description of Artificial Sequence: Synthetic peptide
  MOD_RES (6): Unknown amino acid; translation read-through at TGA stop codon
WLDHEXAWVQCEVYGRGCPS

SEQ ID NO: 953 - protein, 20 aa, Artificial Sequence
  Description of Artificial Sequence: Synthetic peptide
QLEQEWAWVRCEVYGRGCSS

SEQ ID NO: 954 - protein, 20 aa, Artificial Sequence
  Description of Artificial Sequence: Synthetic peptide
WLDQEWAWVQCQVYGRGCLS

SEQ ID NO: 955 - protein, 20 aa, Artificial Sequence
  Description of Artificial Sequence: Synthetic peptide
WLDQEWAWVRCEVYGLGCPS

SEQ ID NO: 956 - protein, 20 aa, Artificial Sequence
  Description of Artificial Sequence: Synthetic peptide
WLDQEWAVMKCELYGRGCPS

SEQ ID NO: 957 - protein, 20 aa, Artificial Sequence
  Description of Artificial Sequence: Synthetic peptide
WLEQEWAWVQCEVYGRGCLS

SEQ ID NO: 958 - protein, 20 aa, Artificial Sequence
  Description of Artificial Sequence: Synthetic peptide
SLDQEWAWVQCEVYGRGCLS

SEQ ID NO: 959 - protein, 20 aa, Artificial Sequence
  Description of Artificial Sequence: Synthetic peptide
WLDHEWAWVQCEVYGRGCTS

SEQ ID NO: 960 - protein, 20 aa, Artificial Sequence
  Description of Artificial Sequence: Synthetic peptide
WLDVEWAWVQCEVYGRGCPS

SEQ ID NO: 961 - protein, 20 aa, Artificial Sequence
  Description of Artificial Sequence: Synthetic peptide
QLDQEWARVRCEVWGRGCSS

SEQ ID NO: 962 - protein, 20 aa, Artificial Sequence
  Description of Artificial Sequence: Synthetic peptide
WLDLEWAQVQCKVYGRGCPS

SEQ ID NO: 963 - protein, 20 aa, Artificial Sequence
  Description of Artificial Sequence: Synthetic peptide
WLDEEWAWVQCQVYGRGCPS

SEQ ID NO: 964 - protein, 20 aa, Artificial Sequence
  Description of Artificial Sequence: Synthetic peptide
WLDQEWAWVQCEVWGRGCAF

SEQ ID NO: 965 - protein, 20 aa, Artificial Sequence
  Description of Artificial Sequence: Synthetic peptide
WLDREWAQVQCEVYGRGCLS

SEQ ID NO: 966 - protein, 20 aa, Artificial Sequence
  Description of Artificial Sequence: Synthetic peptide
WLDAEWEWVQCEVYGRGCRP

SEQ ID NO: 967 - protein, 20 aa, Artificial Sequence
  Description of Artificial Sequence: Synthetic peptide
SLDREWAYVQCQVYGRGCSS

SEQ ID NO: 968 - protein, 20 aa, Artificial Sequence
  Description of Artificial Sequence: Synthetic peptide
RLDLEWANIQCEVYGRGCPS

SEQ ID NO: 969 - protein, 20 aa, Artificial Sequence
  Description of Artificial Sequence: Synthetic peptide
WLEQEWARVQCEVYGRGCSS

SEQ ID NO: 970 - protein, 20 aa, Artificial Sequence
  Description of Artificial Sequence: Synthetic peptide
WLEQEWILVECEVYGRGCPT

SEQ ID NO: 971 - protein, 20 aa, Artificial Sequence
  Description of Artificial Sequence: Synthetic peptide
WLEQEWAQVQCEVWGRGCPS

SEQ ID NO: 972 - protein, 20 aa, Artificial Sequence
  Description of Artificial Sequence: Synthetic peptide
WLDQEWEWIQCEVYGRGCPL

SEQ ID NO: 973 - protein, 20 aa, Artificial Sequence
  Description of Artificial Sequence: Synthetic peptide
LLDEEWAQIECEIYGRGCPS

SEQ ID NO: 974 - protein, 20 aa, Artificial Sequence
  Description of Artificial Sequence: Synthetic peptide
ALEEEWAWVQCEVYGRGCHF

SEQ ID NO: 975 - protein, 20 aa, Artificial Sequence
  Description of Artificial Sequence: Synthetic peptide
  MOD_RES (2): Unknown amino acid
CXEQEWGLVQCEVYGRGCPS

SEQ ID NO: 976 - protein, 20 aa, Artificial Sequence
  Description of Artificial Sequence: Synthetic peptide
WLEQEWAYVQCEVYGRGCPS

SEQ ID NO: 977 - protein, 20 aa, Artificial Sequence
  Description of Artificial Sequence: Synthetic peptide
WLEHEWAQVQCEVWGRGCPY

SEQ ID NO: 978 - protein, 20 aa, Artificial Sequence
  Description of Artificial Sequence: Synthetic peptide
WLEQEWAEVRCEVYGRGCPR

SEQ ID NO: 979 - protein, 20 aa, Artificial Sequence
  Description of Artificial Sequence: Synthetic peptide
  MOD_RES (1): Unknown amino acid
XLEQEWAWVQCEVYGRGCPS

SEQ ID NO: 980 - protein, 20 aa, Artificial Sequence
  Description of Artificial Sequence: Synthetic peptide
WLEQEWAGIQCKVYGRGCPS

SEQ ID NO: 981 - protein, 20 aa, Artificial Sequence
  Description of Artificial Sequence: Synthetic peptide
RLEQEWAQVQCEVWGRGCLP

SEQ ID NO: 982 - protein, 20 aa, Artificial Sequence
  Description of Artificial Sequence: Synthetic peptide
QLDHEWAGIQCEVWGRGCPS

SEQ ID NO: 983 - protein, 20 aa, Artificial Sequence
  Description of Artificial Sequence: Synthetic peptide
WLEQEWAQIQCEVYGAGCRS

SEQ ID NO: 984 - protein, 20 aa, Artificial Sequence
  Description of Artificial Sequence: Synthetic peptide
SLEQEWAWVQCVVYGRGCPI

SEQ ID NO: 985 - protein, 20 aa, Artificial Sequence
  Description of Artificial Sequence: Synthetic peptide
WLEQEWDQVLCEVYGRGCPY

SEQ ID NO: 986 - protein, 20 aa, Artificial Sequence
  Description of Artificial Sequence: Synthetic peptide
  MOD_RES (10): Unknown amino acid
  MOD_RES (20): Unknown amino acid
WLEQEWAQVXCEVYGRGCAX

SEQ ID NO: 987 - protein, 20 aa, Artificial Sequence
  Description of Artificial Sequence: Synthetic peptide
WMDQEWAWVQCEVYGRGCPS

SEQ ID NO: 988 - protein, 20 aa, Artificial Sequence
  Description of Artificial Sequence: Synthetic peptide
QLDQEWAWIQCEVYGRNCRT

SEQ ID NO: 989 - protein, 20 aa, Artificial Sequence
  Description of Artificial Sequence: Synthetic peptide
TLEQEWAQVICEVYGRGCLS

SEQ ID NO: 990 - protein, 20 aa, Artificial Sequence
  Description of Artificial Sequence: Synthetic peptide
RLEQEWAQVQCEVWGRGCLS

SEQ ID NO: 991 - protein, 20 aa, Artificial Sequence
  Description of Artificial Sequence: Synthetic peptide
WLDQEWALVQCEVYGRGCPA

SEQ ID NO: 992 - protein, 20 aa, Artificial Sequence
  Description of Artificial Sequence: Synthetic peptide
WLDQEWAQIQCHVWGRGCPA

SEQ ID NO: 993 - protein, 20 aa, Artificial Sequence
  Description of Artificial Sequence: Synthetic peptide
WLEQEWAWVQCEVYGRGCPS

SEQ ID NO: 994 - protein, 20 aa, Artificial Sequence
  Description of Artificial Sequence: Synthetic peptide
RLEEEWAWVQCQVYGRGCPS

SEQ ID NO: 995 - protein, 20 aa, Artificial Sequence
  Description of Artificial Sequence: Synthetic peptide
WLEQEWVRIQCEVYGRGCPS

SEQ ID NO: 996 - protein, 20 aa, Artificial Sequence
  Description of Artificial Sequence: Synthetic peptide
WLEQEWTWVQCEVYGCGCPS

SEQ ID NO: 997 - protein, 20 aa, Artificial Sequence
  Description of Artificial Sequence: Synthetic peptide
WLEKEWAGVQCEIYGRGCPS

SEQ ID NO: 998 - protein, 20 aa, Artificial Sequence
  Description of Artificial Sequence: Synthetic peptide
WLEEEWAWVRCEVYGRGCQS

SEQ ID NO: 999 - protein, 20 aa, Artificial Sequence
  Description of Artificial Sequence: Synthetic peptide
WLEHEWAQIQCELYGRGCTY

SEQ ID NO: 1000 - protein, 20 aa, Artificial Sequence
  Description of Artificial Sequence: Synthetic peptide
ALEEEWAWVQCEVYGRGCPS

SEQ ID NO: 1001 - protein, 20 aa, Artificial Sequence
  Description of Artificial Sequence: Synthetic peptide
WLEQEWAQVQCEVYGRGCPS

SEQ ID NO: 1002 - protein, 20 aa, Artificial Sequence
  Description of Artificial Sequence: Synthetic peptide
WLDDEWAQIQCEIYGRGCQS

SEQ ID NO: 1003 - protein, 20 aa, Artificial Sequence
  Description of Artificial Sequence: Synthetic peptide
QLEEEWAGVQCEVYGRECPS

SEQ ID NO: 1004 - protein, 20 aa, Artificial Sequence
  Description of Artificial Sequence: Synthetic peptide
WLEQEWLLVQCGVYGRGCPS

SEQ ID NO: 1005 - protein, 20 aa, Artificial Sequence
  Description of Artificial Sequence: Synthetic peptide
WLDQEWAWIQCEVYGRGCRS

SEQ ID NO: 1006 - protein, 20 aa, Artificial Sequence
  Description of Artificial Sequence: Synthetic peptide
WLEQEWAQVQCEVSGRGCPS

SEQ ID NO: 1007 - protein, 20 aa, Artificial Sequence
  Description of Artificial Sequence: Synthetic peptide
  MOD_RES (2): Unknown amino acid
WXDQEWALIQCEVYGRGCPS

SEQ ID NO: 1008 - protein, 20 aa, Artificial Sequence
  Description of Artificial Sequence: Synthetic peptide
SLDEEWAGVLCEVYGRGCPF

SEQ ID NO: 1009 - protein, 20 aa, Artificial Sequence
  Description of Artificial Sequence: Synthetic peptide
SVDQELEWLMCHFQGRVCPS

SEQ ID NO: 1010 - protein, 20 aa, Artificial Sequence
  Description of Artificial Sequence: Synthetic peptide
WLEQERAWIWCEIQGSGCRA

SEQ ID NO: 1011 - protein, 20 aa, Artificial Sequence
  Description of Artificial Sequence: Synthetic peptide
WVNQALGGVQSDVQGRRCQS

SEQ ID NO: 1012 - protein, 20 aa, Artificial Sequence
  Description of Artificial Sequence: Synthetic peptide
LLDHEWPWVGCEVCGRGSLS

SEQ ID NO: 1013 - protein, 20 aa, Artificial Sequence
  Description of Artificial Sequence: Synthetic peptide
WLHQELAWVRGEGYPRGRRS

SEQ ID NO: 1014 - protein, 20 aa, Artificial Sequence
  Description of Artificial Sequence: Synthetic peptide
WLGHDWAWIQCEVYGLGCPC

SEQ ID NO: 1015 - protein, 20 aa, Artificial Sequence
  Description of Artificial Sequence: Synthetic peptide
  MOD_RES (14): Unknown amino acid; translation read-through at TGA stop codon
WIDQEGVRVQCEAXGRAFPS

SEQ ID NO: 1016 - protein, 20 aa, Artificial Sequence
  Description of Artificial Sequence: Synthetic peptide
WRDEEWAWVQGVVQGRGWPA

SEQ ID NO: 1017 - protein, 20 aa, Artificial Sequence
  Description of Artificial Sequence: Synthetic peptide
RLGVEWSWFQRKVYGRDSTS

SEQ ID NO: 1018 - protein, 20 aa, Artificial Sequence
  Description of Artificial Sequence: Synthetic peptide
WLAQGWAGVQCVVYGRGCRN

SEQ ID NO: 1019 - protein, 20 aa, Artificial Sequence
  Description of Artificial Sequence: Synthetic peptide
  MOD_RES (6): Unknown amino acid; translation read-through at TGA stop codon
  MOD_RES (14): Unknown amino acid
WLEEEXAGIQCQVXGRGCPS

SEQ ID NO: 1020 - protein, 20 aa, Artificial Sequence
  Description of Artificial Sequence: Synthetic peptide
WLDQEWEWVQCEVWGRGCLS

SEQ ID NO: 1021 - protein, 20 aa, Artificial Sequence
  Description of Artificial Sequence: Synthetic peptide
RLEQEWALIQCEVYGRGCPS

SEQ ID NO: 1022 - protein, 20 aa, Artificial Sequence
  Description of Artificial Sequence: Synthetic peptide
WLEEEWAQVQCQVYGRGCAS

SEQ ID NO: 1023 - protein, 20 aa, Artificial Sequence
  Description of Artificial Sequence: Synthetic peptide
  MOD_RES (6): Unknown amino acid; translation read-through at TGA stop codon
WLDLEXEWLQCEVYGRGCAT

SEQ ID NO: 1024 - protein, 20 aa, Artificial Sequence
  Description of Artificial Sequence: Synthetic peptide
WLEQEWVQVRCEVYGRGCPS

SEQ ID NO: 1025 - protein, 20 aa, Artificial Sequence
  Description of Artificial Sequence: Synthetic peptide
WLEEEWAQVQCEVYGRGCPS

SEQ ID NO: 1026 - protein, 20 aa, Artificial Sequence
  Description of Artificial Sequence: Synthetic peptide
WLDQEWARVQCEVWGRGCTY

SEQ ID NO: 1027 - protein, 20 aa, Artificial Sequence
  Description of Artificial Sequence: Synthetic peptide
  MOD_RES (4): Unknown amino acid
YLDXEWAWVQCEVYGLGCQS

SEQ ID NO: 1028 - protein, 20 aa, Artificial Sequence
  Description of Artificial Sequence: Synthetic peptide
  MOD_RES (6): Unknown amino acid; translation read-through at TGA stop codon
WLDVEXAWVQCEVWGRGCPS

SEQ ID NO: 1029 - protein, 20 aa, Artificial Sequence
  Description of Artificial Sequence: Synthetic peptide
  MOD_RES (9): Unknown amino acid
WLEQEWERXQCEVYGRGCPP

SEQ ID NO: 1030 - protein, 20 aa, Artificial Sequence
  Description of Artificial Sequence: Synthetic peptide
WLEEEWAQVQCEVYGRGCLS

SEQ ID NO: 1031 - protein, 20 aa, Artificial Sequence
  Description of Artificial Sequence: Synthetic peptide
WLDQEWAWIQCEVYGRGCPS

SEQ ID NO: 1032 - protein, 20 aa, Artificial Sequence
  Description of Artificial Sequence: Synthetic peptide
  MOD_RES (1): Unknown amino acid
  MOD_RES (14): Unknown amino acid
XLEHEWAQIQCEVXGRGCQS

SEQ ID NO: 1033 - protein, 20 aa, Artificial Sequence
  Description of Artificial Sequence: Synthetic peptide
  MOD_RES (3): Unknown amino acid
WLXQEWAWIQCEVYGRGCPF

SEQ ID NO: 1034 - protein, 20 aa, Artificial Sequence
  Description of Artificial Sequence: Synthetic peptide
  MOD_RES (4): Unknown amino acid
WLDXEWAWVQCEVYGRGCPS

SEQ ID NO: 1035 - protein, 20 aa, Artificial Sequence
  Description of Artificial Sequence: Synthetic peptide
GLEQGCPWVGLEVQCRGCPS

SEQ ID NO: 1036 - protein, 20 aa, Artificial Sequence
  Description of Artificial Sequence: Synthetic peptide
WLEEEWAWVQCEVYGHGCPS

SEQ ID NO: 1037 - protein, 20 aa, Artificial Sequence
  Description of Artificial Sequence: Synthetic peptide
WLDQEWAQIQCEVYGRGCSS

SEQ ID NO: 1038 - protein, 20 aa, Artificial Sequence
  Description of Artificial Sequence: Synthetic peptide
WLDQEWAQVQCEVWGRGCPS

SEQ ID NO: 1039 - protein, 20 aa, Artificial Sequence
  Description of Artificial Sequence: Synthetic peptide
WLDLEWEFVQCEVYGRGCPT

SEQ ID NO: 1040 - protein, 20 aa, Artificial Sequence
  Description of Artificial Sequence: Synthetic peptide
WLEQEWASVQCEVYGRGCPS

SEQ ID NO: 1041 - protein, 20 aa, Artificial Sequence
  Description of Artificial Sequence: Synthetic peptide
WLDLEWEQIKCKVYGRGCPF

SEQ ID NO: 1042 - protein, 20 aa, Artificial Sequence
  Description of Artificial Sequence: Synthetic peptide
WLEQEWAQIQCQIYGRGCPS

SEQ ID NO: 1043 - protein, 20 aa, Artificial Sequence
  Description of Artificial Sequence: Synthetic peptide
WLEQEWALVLCEVYGHGCPA

SEQ ID NO: 1044 - protein, 20 aa, Artificial Sequence
  Description of Artificial Sequence: Synthetic peptide
WLEQEWAQIQCEVWGRGCSS

SEQ ID NO: 1045 - protein, 20 aa, Artificial Sequence
  Description of Artificial Sequence: Synthetic peptide
  MOD_RES (4): Unknown amino acid
  MOD_RES (19): Unknown amino acid
WLEXEWEWVQCEVYGRGCXS

SEQ ID NO: 1046 - protein, 20 aa, Artificial Sequence
  Description of Artificial Sequence: Synthetic peptide
WLEQEWAQVQCDVYGRGCPS

SEQ ID NO: 1047 - protein, 20 aa, Artificial Sequence
  Description of Artificial Sequence: Synthetic peptide
  MOD_RES (6): Unknown amino acid; translation read-through at TGA stop codon
WLEQEXARVQCEVWGRGCPS

SEQ ID NO: 1048 - protein, 20 aa, Artificial Sequence
  Description of Artificial Sequence: Synthetic peptide
  MOD_RES (3): Unknown amino acid
  MOD_RES (18): Unknown amino acid
WLXQEWARVHCEVWGRPXQC

SEQ ID NO: 1049 - protein, 20 aa, Artificial Sequence
  Description of Artificial Sequence: Synthetic peptide
PLEHEWAWVQCVVYGRGCRS

SEQ ID NO: 1050 - protein, 20 aa, Artificial Sequence
  Description of Artificial Sequence: Synthetic peptide
  MOD_RES (4): Unknown amino acid
  MOD_RES (14): Unknown amino acid
  MOD_RES (20): Unknown amino acid
SLEXEWAWVQCEVXGRGCPX

SEQ ID NO: 1051 - protein, 20 aa, Artificial Sequence
  Description of Artificial Sequence: Synthetic peptide
WLDQEWVRVQCEVWGRGCPS

SEQ ID NO: 1052 - protein, 20 aa, Artificial Sequence
  Description of Artificial Sequence: Synthetic peptide
SLDKEWAWVKCEVYGRGCPS

SEQ ID NO: 1053 - protein, 20 aa, Artificial Sequence
  Description of Artificial Sequence: Synthetic peptide
  MOD_RES (14): Unknown amino acid; translation read-through at TAA stop codon
LGDQEWAWVEWEVXGRGWPS

SEQ ID NO: 1054 - protein, 20 aa, Artificial Sequence
  Description of Artificial Sequence: Synthetic peptide
WLEEEWAQIRCGVYGRGCPS

SEQ ID NO: 1055 - protein, 20 aa, Artificial Sequence
  Description of Artificial Sequence: Synthetic peptide
  MOD_RES (6): Unknown amino acid; translation read-through at TGA stop codon
WLEEEXGWVQCEVWGRGCPP

SEQ ID NO: 1056 - protein, 20 aa, Artificial Sequence
  Description of Artificial Sequence: Synthetic peptide
  MOD_RES (8): Unknown amino acid
CLDQEWAXVQCPVYGRGCPS

SEQ ID NO: 1057 - protein, 20 aa, Artificial Sequence
  Description of Artificial Sequence: Synthetic peptide
QLELEWARVQCEVWDRGCPS

SEQ ID NO: 1058 - protein, 20 aa, Artificial Sequence
  Description of Artificial Sequence: Synthetic peptide
RLEQEWAWIQCEVYGRGCRF

SEQ ID NO: 1059 - protein, 20 aa, Artificial Sequence
  Description of Artificial Sequence: Synthetic peptide
  MOD_RES (6): Unknown amino acid; translation read-through at TGA stop codon
  MOD_RES (19): Unknown amino acid
SLEHEXAWVQCKVYGRGCXS

SEQ ID NO: 1060 - protein, 20 aa, Artificial Sequence
  Description of Artificial Sequence: Synthetic peptide
WLDQEWAWIQCEVYGRGCPP

SEQ ID NO: 1061 - protein, 20 aa, Artificial Sequence
  Description of Artificial Sequence: Synthetic peptide
WLDQEWAQVRCEVYGRGCPS

SEQ ID NO: 1062 - protein, 20 aa, Artificial Sequence
  Description of Artificial Sequence: Synthetic peptide
PKGTRFRGDVDVWDGYSWLA

SEQ ID NO: 1063 - protein, 20 aa, Artificial Sequence
  Description of Artificial Sequence: Synthetic peptide
TPIPAGGINIASWGGYTWLS

SEQ ID NO: 1064 - protein, 20 aa, Artificial Sequence
  Description of Artificial Sequence: Synthetic peptide
HRGTVTGVWVARWPGYEWLS

SEQ ID NO: 1065 - protein, 20 aa, Artificial Sequence
  Description of Artificial Sequence: Synthetic peptide
SDVWAQPQRRNDWPGYHWLS

SEQ ID NO: 1066 - protein, 20 aa, Artificial Sequence
  Description of Artificial Sequence: Synthetic peptide
HRGTVTGVWVARWPGYEWLS

SEQ ID NO: 1067 - protein, 20 aa, Artificial Sequence
  Description of Artificial Sequence: Synthetic peptide
SDVWAQPQRRNDWPGYHWLS

SEQ ID NO: 1068 - protein, 20 aa, Artificial Sequence
  Description of Artificial Sequence: Synthetic peptide
RPHRINPQDDAVWPGYLWLG

SEQ ID NO: 1069 - protein, 20 aa, Artificial Sequence
  Description of Artificial Sequence: Synthetic peptide
HRGTVTGVWVARWPGYEWLS

SEQ ID NO: 1070 - protein, 20 aa, Artificial Sequence
  Description of Artificial Sequence: Synthetic peptide
FGRGYGGDGGGYWSGYEWLA

SEQ ID NO: 1071 - protein, 21 aa, Artificial Sequence
  Description of Artificial Sequence: Synthetic peptide
  MOD_RES (20): Unknown amino acid
DGLVVKSGREWPGYGWLERXA

SEQ ID NO: 1072 - protein, 20 aa, Artificial Sequence
  Description of Artificial Sequence: Synthetic peptide
  MOD_RES (6): Unknown amino acid
DGSIVXVSSSVGWPGYEWLM

SEQ ID NO: 1073 - protein, 20 aa, Artificial Sequence
  Description of Artificial Sequence: Synthetic peptide
WQQANLSNGGGRWGGYDWLM

SEQ ID NO: 1074 - protein, 20 aa, Artificial Sequence
  Description of Artificial Sequence: Synthetic peptide
FGRGYGGDGGGYWSGYEWLA

SEQ ID NO: 1075 - protein, 20 aa, Artificial Sequence
  Description of Artificial Sequence: Synthetic peptide
VNYEMDRVPPMPWGGYWWLS

SEQ ID NO: 1076 - protein, 20 aa, Artificial Sequence
  Description of Artificial Sequence: Synthetic peptide
MGGGLWVGVHIWPGYSWLSQ

SEQ ID NO: 1077 - protein, 20 aa, Artificial Sequence
  Description of Artificial Sequence: Synthetic peptide
SDVWAQPQRRNDWPGYHWLS

SEQ ID NO: 1078 - protein, 20 aa, Artificial Sequence
  Description of Artificial Sequence: Synthetic peptide
WPGYLFFEEALQDWRGSTED

SEQ ID NO: 1079 - protein, 20 aa, Artificial Sequence
  Description of Artificial Sequence: Synthetic peptide
SMFVAGSDRWPGYGVLADWL

SEQ ID NO: 1080 - protein, 20 aa, Artificial Sequence
  Description of Artificial Sequence: Synthetic peptide
VRGFQGGTVWPGYEWLRNAA

SEQ ID NO: 1081 - protein, 20 aa, Artificial Sequence
  Description of Artificial Sequence: Synthetic peptide
LDLASGDSWLGYDVLRGWLS

SEQ ID NO: 1082 - protein, 20 aa, Artificial Sequence
  Description of Artificial Sequence: Synthetic peptide
IHSSDGIGAWGGYAWFRDVA

SEQ ID NO: 1083 - protein, 20 aa, Artificial Sequence
  Description of Artificial Sequence: Synthetic peptide
LGPLLRWGSEVCGVWPDLCE

SEQ ID NO: 1084 - protein, 20 aa, Artificial Sequence
  Description of Artificial Sequence: Synthetic peptide
PFGFGGRWWGIPRMWWYRNS

SEQ ID NO: 1085 - protein, 20 aa, Artificial Sequence
  Description of Artificial Sequence: Synthetic peptide
WWWGGRNRWWLERWGLGGER

SEQ ID NO: 1086 - protein, 20 aa, Artificial Sequence
  Description of Artificial Sequence: Synthetic peptide
GRVALWGPVWPRWWFMSRPV

SEQ ID NO: 1087 - protein, 39 aa, Artificial Sequence
  Description of Artificial Sequence: Synthetic peptide
RGTRTDRLWKSGGFAIVPRWPCFSYHCLVEWITKTGSPG

SEQ ID NO: 1088 - protein, 32 aa, Artificial Sequence
  Description of Artificial Sequence: Synthetic peptide
GRTSMAFVPPRHLQPELAPRPVRNHAWLVGGG

SEQ ID NO: 1089 - protein, 20 aa, Artificial Sequence
  Description of Artificial Sequence: Synthetic peptide
CLGAGSFRAGILCLGGLPVS

SEQ ID NO: 1090 - protein, 20 aa, Artificial Sequence
  Description of Artificial Sequence: Synthetic peptide
GFWATACGGLQICEELGLKP

SEQ ID NO: 1091 - protein, 20 aa, Artificial Sequence
  Description of Artificial Sequence: Synthetic peptide
DLFCAYMAQALGLGQDLSCG

SEQ ID NO: 1092 - protein, 19 aa, Artificial Sequence
  Description of Artificial Sequence: Synthetic peptide
  MOD_RES (13): Unknown amino acid; translation read-through at TGA stop codon
RHLLLPQIWIASXGGWGMG

SEQ ID NO: 1093 - protein, 25 aa, Artificial Sequence
  Description of Artificial Sequence: Synthetic peptide
DHRLCGTDEYLMQDLFVRGLCRLIW

SEQ ID NO: 1094 - protein, 25 aa, Artificial Sequence
  Description of Artificial Sequence: Synthetic peptide
GLLFCKQLFTLAGLQPEAGCVSSSR

SEQ ID NO: 1095 - protein, 25 aa, Artificial Sequence
  Description of Artificial Sequence: Synthetic peptide
IWIACLDELLRGQVWSSCRRRAPIG

SEQ ID NO: 1096 - protein, 25 aa, Artificial Sequence
  Description of Artificial Sequence: Synthetic peptide
DWLRCLGVILSGGLTELANTGCVQG

SEQ ID NO: 1097 - protein, 25 aa, Artificial Sequence
  Description of Artificial Sequence: Synthetic peptide
WFSFCLGGLLQAQEWSVWGRDVGCI

SEQ ID NO: 1098 - protein, 25 aa, Artificial Sequence
  Description of Artificial Sequence: Synthetic peptide
GYSWLRDVLMEKQAQLKREGSVGRQ

SEQ ID NO: 1099 - protein, 25 aa, Artificial Sequence
  Description of Artificial Sequence: Synthetic peptide
  MOD_RES (13): Unknown amino acid; translation read-through at TGA stop codon
FLTRLLERLGLSXERGEAGGPYAQA

SEQ ID NO: 1100 - protein, 25 aa, Artificial Sequence
  Description of Artificial Sequence: Synthetic peptide
FSGFCMGLERLSQVSLGYCGAGQGG

SEQ ID NO: 1101 - protein, 25 aa, Artificial Sequence
  Description of Artificial Sequence: Synthetic peptide
ISFRCQLFVLAGMHPCPVDVGGEGF

SEQ ID NO: 1102 - protein, 25 aa, Artificial Sequence
  Description of Artificial Sequence: Synthetic peptide
NTPNCSQDWGQESGFMALLLALTCK

SEQ ID NO: 1103 - protein, 25 aa, Artificial Sequence
  Description of Artificial Sequence: Synthetic peptide
LQGFCELLATVTGVTGLGCLDYQPI

SEQ ID NO: 1104 - protein, 25 aa, Artificial Sequence
  Description of Artificial Sequence: Synthetic peptide
GSSICNLLARAQIVELALCEMGVQE

SEQ ID NO: 1105 - protein, 23 aa, Artificial Sequence
  Description of Artificial Sequence: Synthetic peptide
LSFACLLSQLSGVVLPDCLLGED

SEQ ID NO: 1106 - protein, 25 aa, Artificial Sequence
  Description of Artificial Sequence: Synthetic peptide
GEHFCQLLMSLCGDDCGPVNCGGGS

SEQ ID NO: 1107 - protein, 25 aa, Artificial Sequence
  Description of Artificial Sequence: Synthetic peptide
GWFECLLASLVLQVPQGRSRASAVC

SEQ ID NO: 1108 - protein, 25 aa, Artificial Sequence
  Description of Artificial Sequence: Synthetic peptide
YRQECACSVGAVGFLCGLACLARSG

SEQ ID NO: 1109 - protein, 40 aa, Artificial Sequence
  Description of Artificial Sequence: Synthetic peptide
LSCLAYSRHGIWRPSTDLGLGRSVGEGSVSTRWRGYDWFE

SEQ ID NO: 1110 - protein, 39 aa, Artificial Sequence
  Description of Artificial Sequence: Synthetic peptide
  MOD_RES (19): Unknown amino acid
GLDHSDAVGVHLGFAWPAXARGRWEAGGLEDTWAGYDWL

SEQ ID NO: 1111 - protein, 8 aa, Artificial Sequence
  Description of Artificial Sequence: Synthetic peptide
  MOD_RES (2): Unknown amino acid
WXGYAWLS

SEQ ID NO: 1112 - protein, 40 aa, Artificial Sequence; identical to SEQ ID NO: 1109
  Description of Artificial Sequence: Synthetic peptide

SEQ ID NO: 1113 - protein, 40 aa, Artificial Sequence
  Description of Artificial Sequence: Synthetic peptide
  MOD_RES (31): Unknown amino acid
EAMAVGLQCPARFVRAAAHGDGGSWGQDHVXAWGGYWWLG

SEQ ID NO: 1114 - protein, 20 aa, Artificial Sequence
  Description of Artificial Sequence: Synthetic peptide
HLCVLEELFWGASLFGYCSG

SEQ ID NO: 1115 - protein, 20 aa, Artificial Sequence
  Description of Artificial Sequence: Synthetic peptide
HFYVLVERLSGASLFGSGSA

SEQ ID NO: 1116 - protein, 20 aa, Artificial Sequence
  Description of Artificial Sequence: Synthetic peptide
HRFVREGLLWGAYQFCYCSG

SEQ ID NO: 1117 - protein, 20 aa, Artificial Sequence
  Description of Artificial Sequence: Synthetic peptide
FQSLLEELVWGAPLFRYGTG

SEQ ID NO: 1118 - protein, 20 aa, Artificial Sequence
  Description of Artificial Sequence: Synthetic peptide
HLSVLEELSWGASLFGQWAG

SEQ ID NO: 1119 - protein, 20 aa, Artificial Sequence
  Description of Artificial Sequence: Synthetic peptide
HLSVLEELSWGASLFGQWAG

SEQ ID NO: 1120 - protein, 20 aa, Artificial Sequence
  Description of Artificial Sequence: Synthetic peptide
NLCRLEELAWGASLFGQCAG

SEQ ID NO: 1121 - protein, 20 aa, Artificial Sequence
  Description of Artificial Sequence: Synthetic peptide
APVSTEELRWGALLFGQWAG

SEQ ID NO: 1122 - protein, 20 aa, Artificial Sequence
  Description of Artificial Sequence: Synthetic peptide
HLSVLEERWWRESLFGQWAG

SEQ ID NO: 1123 - protein, 20 aa, Artificial Sequence
  Description of Artificial Sequence: Synthetic peptide
HLSVLEERWWRAALFGQWAG

SEQ ID NO: 1124 - protein, 20 aa, Artificial Sequence
  Description of Artificial Sequence: Synthetic peptide
HLSILEEQWWRESLFGQWAG

SEQ ID NO: 1125 - protein, 19 aa, Artificial Sequence
  Description of Artificial Sequence: Synthetic peptide
HMSVEELSWWASLFGKQAG

SEQ ID NO: 1126 - protein, 20 aa, Artificial Sequence
  Description of Artificial Sequence: Synthetic peptide
HLSELEERWWRATLFGQWAG

SEQ ID NO: 1127 - protein, 20 aa, Artificial Sequence
  Description of Artificial Sequence: Synthetic peptide
HLSVLEELWWRESLFGQWAG

SEQ ID NO: 1128 - protein, 20 aa, Artificial Sequence
  Description of Artificial Sequence: Synthetic peptide
HLSLLEEQWWRESLFGQWAG

SEQ ID NO: 1129 - protein, 20 aa, Artificial Sequence
  Description of Artificial Sequence: Synthetic peptide
HLSVLEERWWRETLFGQWAG

SEQ ID NO: 1130 - protein, 20 aa, Artificial Sequence
  Description of Artificial Sequence: Synthetic peptide
HLSVLEEQWWRESLFGQWAG

SEQ ID NO: 1131 - protein, 20 aa, Artificial Sequence
  Description of Artificial Sequence: Synthetic peptide
  MOD_RES (11): Unknown amino acid
HLSVLEEQWWXESLFGQWAG

SEQ ID NO: 1132 - protein, 20 aa, Artificial Sequence
  Description of Artificial Sequence: Synthetic peptide
HLSVLEELWWREALFGQWAG

SEQ ID NO: 1133 - protein, 20 aa, Artificial Sequence
  Description of Artificial Sequence: Synthetic peptide
HLSVLEERWWRATLFGEWAG

SEQ ID NO: 1134 - protein, 20 aa, Artificial Sequence
  Description of Artificial Sequence: Synthetic peptide
  MOD_RES (3): Unknown amino acid
HLXVLEELLWGVSLFRQWAG

SEQ ID NO: 1135 - protein, 20 aa, Artificial Sequence
  Description of Artificial Sequence: Synthetic peptide
HLSALEEQWWRATLFGQWAG

SEQ ID NO: 1136 - protein, 19 aa, Artificial Sequence
  Description of Artificial Sequence: Synthetic peptide
HLSVLEERWWRATLLESGQ

SEQ ID NO: 1137 - protein, 20 aa, Artificial Sequence
  Description of Artificial Sequence: Synthetic peptide
HLSALEELWWRETLFGQWAG

SEQ ID NO: 1138 - protein, 20 aa, Artificial Sequence
  Description of Artificial Sequence: Synthetic peptide
HLSVLEELWWRESLFGKWAG

SEQ ID NO: 1139 - protein, 20 aa, Artificial Sequence
  Description of Artificial Sequence: Synthetic peptide
HLSVLEEAWWRESLFGHWAG

SEQ ID NO: 1140 - protein, 20 aa, Artificial Sequence
  Description of Artificial Sequence: Synthetic peptide
HMSEQEELWWRATLFGQWAG

SEQ ID NO: 1141 - protein, 20 aa, Artificial Sequence
  Description of Artificial Sequence: Synthetic peptide
HLSVLEERWWRETLFGEWAG

SEQ ID NO: 1142 - protein, 20 aa, Artificial Sequence
  Description of Artificial Sequence: Synthetic peptide
HRSVLKQLSWGASLFGQWAG

SEQ ID NO: 1143 - protein, 20 aa, Artificial Sequence
  Description of Artificial Sequence: Synthetic peptide
  MOD_RES (3): Unknown amino acid; translation read-through at TGA stop codon
HLXVLEELSWGASLVGQWAV

SEQ ID NO: 1144 - protein, 20 aa, Artificial Sequence
  Description of Artificial Sequence: Synthetic peptide
  MOD_RES (9): Unknown amino acid; translation read-through at TGA stop codon
HLSVLEELXLGASMFGLWAG

SEQ ID NO: 1145 - protein, 20 aa, Artificial Sequence
  Description of Artificial Sequence: Synthetic peptide
  MOD_RES (11): Unknown amino acid; translation read-through at TGA stop codon
HLSVLKELSWXASLFGQWAG

SEQ ID NO: 1146 - protein, 20 aa, Artificial Sequence
  Description of Artificial Sequence: Synthetic peptide
HLSALEELSWGASLFGQWAG

SEQ ID NO: 1147 - protein, 20 aa, Artificial Sequence
  Description of Artificial Sequence: Synthetic peptide
  MOD_RES (10): Unknown amino acid; translation read-through at TGA stop codon
HLSVLAELSXGALLFGQWAG

SEQ ID NO: 1148 - protein, 20 aa, Artificial Sequence
  Description of Artificial Sequence: Synthetic peptide
RLSVLEQLSWGASLFGPWAG

SEQ ID NO: 1149 - protein, 20 aa, Artificial Sequence
  Description of Artificial Sequence: Synthetic peptide
  MOD_RES (3): Unknown amino acid; translation read-through at TGA stop codon
HLXVLVQPSWGASLFGQWAG

SEQ ID NO: 1150 - protein, 20 aa, Artificial Sequence
  Description of Artificial Sequence: Synthetic peptide
  MOD_RES (11): Unknown amino acid; translation read-through at TGA stop codon
HQSVLEELSRXASLFGQWAG

SEQ ID NO: 1151 - protein, 20 aa, Artificial Sequence
  Description of Artificial Sequence: Synthetic peptide
  MOD_RES (13): Unknown amino acid; translation read-through at TGA stop codon
DMSVLGGLSWGAXLFGQWSG

SEQ ID NO: 1152 - protein, 20 aa, Artificial Sequence
  Description of Artificial Sequence: Synthetic peptide
HLSVREGQLWRASMFGRWAG

SEQ ID NO: 1153 - protein, 20 aa, Artificial Sequence
  Description of Artificial Sequence: Synthetic peptide
  MOD_RES (9): Unknown amino acid; translation read-through at TGA stop codon
QLSVLVELXWGASLFGPWAA

SEQ ID NO: 1154 - protein, 20 aa, Artificial Sequence
  Description of Artificial Sequence: Synthetic peptide
  MOD_RES (11): Unknown amino acid; translation read-through at TGA stop codon
HLSVGEELSWXVALLGQWAR

SEQ ID NO: 1155 - protein, 24 aa, Artificial Sequence
  Description of Artificial Sequence: Synthetic peptide
KIGGQGQHQDGNFYDWFVEALAKK

SEQ ID NO: 1156 - protein, 23 aa, Artificial Sequence
  Description of Artificial Sequence: Synthetic peptide
KVLQARHGCDSVSDCFYEWFAKK

SEQ ID NO: 1157 - protein, 23 aa, Artificial Sequence
  Description of Artificial Sequence: Synthetic peptide
KWSALLSVMDTGFYAWFDDAVKK

SEQ ID NO: 1158 - protein, 23 aa, Artificial Sequence
  Description of Artificial Sequence: Synthetic peptide
KGHSWALVRHVDRLFYEWFDLKK

SEQ ID NO: 1159 - protein, 23 aa, Artificial Sequence
  Description of Artificial Sequence: Synthetic peptide
KRDKPTDQEEQNWSFYEWFRHKK

SEQ ID NO: 1160 - protein, 24 aa, Artificial Sequence
  Description of Artificial Sequence: Synthetic peptide
KVFWNCRSQQLDFYEWWFEQAAKK

SEQ ID NO: 1161 - protein, 24 aa, Artificial Sequence
  Description of Artificial Sequence: Synthetic peptide
KLESHYVVPQAALDRLFYSWFSKK

SEQ ID NO: 1162 - protein, 23 aa, Artificial Sequence
  Description of Artificial Sequence: Synthetic peptide
KFYGWFSRQLSLTPRDDWGLPKK

SEQ ID NO: 1163 - protein, 23 aa, Artificial Sequence
  Description of Artificial Sequence: Synthetic peptide
KSAPGLVSNKQDGLFYSWFREKK

SEQ ID NO: 1164 - protein, 23 aa, Artificial Sequence
  Description of Artificial Sequence: Synthetic peptide
KRGGGTFYEWFESALRKHGAGKK

SEQ ID NO: 1165 - protein, 23 aa, Artificial Sequence
  Description of Artificial Sequence: Synthetic peptide
KDPERMQSDVGFYEWFRAAVGKK

SEQ ID NO: 1166 - protein, 27 aa, Artificial Sequence
  Description of Artificial Sequence: Synthetic peptide
DYKDCWARPCGDAANFYDWFVQQASKK

SEQ ID NO: 1167 - protein, 27 aa, Artificial Sequence
  Description of Artificial Sequence: Synthetic peptide
DYKDVTFTSAVFHENFYDWFVRQVSKK

SEQ ID NO: 1168 - protein, 12 aa, Artificial Sequence
  Description of Artificial Sequence: Synthetic peptide
SAKNFYDWFVKK

SEQ ID NO: 1169 - protein, 14 aa, Artificial Sequence
  Description of Artificial Sequence: Synthetic peptide
ADKNFYDWFMAAKK

SEQ ID NO: 1170 - protein, 23 aa, Artificial Sequence
  Description of Artificial Sequence: Synthetic peptide
DYKDLCQSWGVRIGWLAGLCPKK

SEQ ID NO: 1171 - protein, 16 aa, Artificial Sequence
  Description of Artificial Sequence: Synthetic peptide
FHENFYDWFVRQVSKK

SEQ ID NO: 1172 - protein, 26 aa, Artificial Sequence
  Description of Artificial Sequence: Synthetic peptide
DYKDFYDAIDQLVRGSARAGGTRDKK

SEQ ID NO: 1173 - protein, 23 aa, Artificial Sequence
  Description of Artificial Sequence: Synthetic peptide
KDRAFYNGLRDLVGAVYGAWDKK

SEQ ID NO: 1174 - protein, 23 aa, Artificial Sequence
  Description of Artificial Sequence: Synthetic peptide
KVRGFQGGTVWPGYEWLRNAAKK

SEQ ID NO: 1175 - protein, 23 aa, Artificial Sequence
  Description of Artificial Sequence: Synthetic peptide
KSMFVAGSDRWPGYGVLADWLKK

SEQ ID NO: 1176 - protein, 23 aa, Artificial Sequence
  Description of Artificial Sequence: Synthetic peptide
KEIEAEWGRVRCLVYGRCVGGKK

SEQ ID NO: 1177 - protein, 23 aa, Artificial Sequence
  Description of Artificial Sequence: Synthetic peptide
KWLDQEWAWVQCEVYGRGCPSKK

SEQ ID NO: 1178 - protein, 23 aa, Artificial Sequence
  Description of Artificial Sequence: Synthetic peptide
KHLCVLEELFWGASLFGYCSGKK

SEQ ID NO: 1179 - protein, 26 aa, Artificial Sequence
  Description of Artificial Sequence: Synthetic peptide
DYKDERSAAGFRGNFYDWFVAQVNKK

SEQ ID NO: 1180 - protein, 16 aa, Artificial Sequence
  Description of Artificial Sequence: Synthetic peptide
LGENFYDWFVMQVRKK

SEQ ID NO: 1181 - protein, 26 aa, Artificial Sequence
  Description of Artificial Sequence: Synthetic peptide
DYKDFYDAIDQLVRGSARAGGTRDKK

SEQ ID NO: 1182 - protein, 27 aa, Artificial Sequence
  Description of Artificial Sequence: Synthetic peptide
DYKDCWARPCGDAANFYDWFVQQASKK

SEQ ID NO: 1183 - protein, 23 aa, Artificial Sequence
  Description of Artificial Sequence: Synthetic peptide
KWLDQEWAWVQCEVYGRGCPSKK

SEQ ID NO: 1184 - protein, 19 aa, Artificial Sequence
  Description of Artificial Sequence: Synthetic peptide
KRGFQGGTVWPGYEWLRNA

SEQ ID NO: 1185 - protein, 23 aa, Artificial Sequence
  Description of Artificial Sequence: Synthetic peptide
KHLCVLEELFWGASLFGYCSGKK

SEQ ID NO: 1186 - protein, 16 aa, Artificial Sequence
  Description of Artificial Sequence: Synthetic peptide
FHENFYDWFVRQVSKK

SEQ ID NO: 1187 - protein, 20 aa, Artificial Sequence
  Description of Artificial Sequence: Synthetic peptide
RLYYEWFWGQLEAQGRGGLS

SEQ ID NO: 1188 - protein, 20 aa, Artificial Sequence
  Description of Artificial Sequence: Synthetic peptide
GLEQGCPWVGLEVQCRGCPS

SEQ ID NO: 1189 - protein, 20 aa, Artificial Sequence
  Description of Artificial Sequence: Synthetic peptide
FYCGLEELSWGAALFGYCSG

SEQ ID NO: 1190 - protein, 20 aa, Artificial Sequence
  Description of Artificial Sequence: Synthetic peptide
GNGDGMFYQLLSLLVGRDMH

SEQ ID NO: 1191 - protein, 26 aa, Artificial Sequence
  Description of Artificial Sequence: Synthetic peptide
GIISQSCPESFYDWFAGQVSDPWWCW

SEQ ID NO: 1192 - protein, 21 aa, Artificial Sequence
  Description of Artificial Sequence: Synthetic peptide
VEGRGLFYDLLRQLLARRQNG

SEQ ID NO: 1193 - protein, 19 aa, Artificial Sequence
  Description of Artificial Sequence: Synthetic peptide
RAMSFYDALVSVLGLGPKK

SEQ ID NO: 1194 - protein, 20 aa, Artificial Sequence
  Description of Artificial Sequence: Synthetic peptide
GSRPVFHEQFYEWFVDQLGL

SEQ ID NO: 1195 - protein, 20 aa, Artificial Sequence
  Description of Artificial Sequence: Synthetic peptide
RSEASFHVEFYSWFEEQLRS

SEQ ID NO: 1196 - protein, 20 aa, Artificial Sequence
  Description of Artificial Sequence: Synthetic peptide
GRFYGWFQDAIDQLMPWGFD

SEQ ID NO: 1197 - protein, 19 aa, Artificial Sequence
  Description of Artificial Sequence: Synthetic peptide
PPWGARFYDAIEQLVFDNL

SEQ ID NO: 1198 - protein, 23 aa, Artificial Sequence
  Description of Artificial Sequence: Synthetic peptide
AGVNAGFYRYFSTLLDWWDQGKK

SEQ ID NO: 1199 - protein, 27 aa, Artificial Sequence
  Description of Artificial Sequence: Synthetic peptide
TFYSCLASLLTGTPQPNRGPWERCRKK

SEQ ID NO: 1200 - protein, 17 aa, Artificial Sequence
  Description of Artificial Sequence: Synthetic peptide
AAVHEQFYDWFADQYKK

SEQ ID NO: 1201 - protein, 17 aa, Artificial Sequence
  Description of Artificial Sequence: Synthetic peptide
QSFYDYIEELLGGEWKK

SEQ ID NO: 1202 - protein, 17 aa, Artificial Sequence
  Description of Artificial Sequence: Synthetic peptide
QSFYDYIEELLGGEWEE

SEQ ID NO: 1203 - protein, 18 aa, Artificial Sequence
  Description of Artificial Sequence: Synthetic peptide
GSLDESFYDWFERQLGKK

SEQ ID NO: 1204 - protein, 18 aa, Artificial Sequence
  Description of Artificial Sequence: Synthetic peptide
GSFYEALQRLVGGEQGKK

SEQ ID NO: 1205 - protein, 17 aa, Artificial Sequence
  Description of Artificial Sequence: Synthetic peptide
QAPSNFYDWFVREWDKK

SEQ ID NO: 1206 - protein, 17 aa, Artificial Sequence
  Description of Artificial Sequence: Synthetic peptide
DPFYQGLWEWLRESGKK

SEQ ID NO: 1207 - protein, 20 aa, Artificial Sequence
  Description of Artificial Sequence: Synthetic peptide
ASGFPENFYDWFGRQLSLKK

SEQ ID NO: 1208 - protein, 20 aa, Artificial Sequence
  Description of Artificial Sequence: Synthetic peptide
SACQFDCHENFYDWFARQKK

SEQ ID NO: 1209 - protein, 20 aa, Artificial Sequence
  Description of Artificial Sequence: Synthetic peptide
SQAGSAFYAWFDQVLRTVKK

SEQ ID NO: 1210 - protein, 20 aa, Artificial Sequence
  Description of Artificial Sequence: Synthetic peptide
VMDARDDPFYHKLSELVTKK

SEQ ID NO: 1211 - protein, 20 aa, Artificial Sequence
  Description of Artificial Sequence: Synthetic peptide
QSDAFYSGLWALIGLSDGKK

SEQ ID NO: 1212 - protein, 19 aa, Artificial Sequence
  Description of Artificial Sequence: Synthetic peptide
LQPCSGFYECIERLIGVKK

SEQ ID NO: 1213 - protein, 19 aa, Artificial Sequence
  Description of Artificial Sequence: Synthetic peptide
LKDGFYDYFWQRLHLGSKK

SEQ ID NO: 1214 - protein, 19 aa, Artificial Sequence
  Description of Artificial Sequence: Synthetic peptide
GSASFYDAIDRLLRMRIKK

SEQ ID NO: 1215 - protein, 20 aa, Artificial Sequence
  Description of Artificial Sequence: Synthetic peptide
WPGYLFFEEALQDWRGSTED

SEQ ID NO: 1216 - protein, 9 aa, Artificial Sequence
  Description of Artificial Sequence: Synthetic peptide
AFYDWFAKK

SEQ ID NO: 1217 - protein, 17 aa, Artificial Sequence
  Description of Artificial Sequence: Synthetic peptide
LDALDRLMRYFEERPSL

SEQ ID NO: 1218 - protein, 20 aa, Artificial Sequence
  Description of Artificial Sequence: Synthetic peptide
PLAELWAYFEHSEQGRSSAH

SEQ ID NO: 1219 - protein, 21 aa, Artificial Sequence
  Description of Artificial Sequence: Synthetic peptide
GRVDWLQRNANFYDWFVAELG

SEQ ID NO: 1220 - protein, 21 aa, Artificial Sequence
  Description of Artificial Sequence: Synthetic peptide
NGVERAGTGDNFYDWFVAQLH

SEQ ID NO: 1221 - protein, 21 aa, Artificial Sequence
  Description of Artificial Sequence: Synthetic peptide
IGGQGQHQDGNFYDWFVEALA

SEQ ID NO: 1222 - protein, 20 aa, Artificial Sequence
  Description of Artificial Sequence: Synthetic peptide
VFWNCRSQQLDFYEWFEQAA

SEQ ID NO: 1223 - protein, 20 aa, Artificial Sequence
  Description of Artificial Sequence: Synthetic peptide
RGGGTFYEWFESALRKHGAG

SEQ ID NO: 1224 - protein, 26 aa, Artificial Sequence
  Description of Artificial Sequence: Synthetic peptide
RVAGAISAPGLVSNKQDGLFYSWFRE

SEQ ID NO: 1225 - protein, 20 aa, Artificial Sequence
  Description of Artificial Sequence: Synthetic peptide
VLQARHGCDSVSDCFYEWFA

SEQ ID NO: 1226 - protein, 20 aa, Artificial Sequence
  Description of Artificial Sequence: Synthetic peptide
DPERMQSDVGFYEWFRAAVG

SEQ ID NO: 1227 - protein, 20 aa, Artificial Sequence
  Description of Artificial Sequence: Synthetic peptide
WSALLSVMDTGFYAWFDDAV

SEQ ID NO: 1228 - protein, 20 aa, Artificial Sequence
  Description of Artificial Sequence: Synthetic peptide
DIGSDGHGRRWDSFYRWFEM

SEQ ID NO: 1229 - protein, 16 aa, Artificial Sequence
  Description of Artificial Sequence: Synthetic peptide
IGGSFVEFYGWFNDQV

SEQ ID NO: 1230 - protein, 20 aa, Artificial Sequence
  Description of Artificial Sequence: Synthetic peptide
GHSWALVRHVDRLFYEWFDL

SEQ ID NO: 1231 - protein, 20 aa, Artificial Sequence
  Description of Artificial Sequence: Synthetic peptide
LPAGGAQGFAVRGFYEWFES

SEQ ID NO: 1232 - protein, 20 aa, Artificial Sequence
  Description of Artificial Sequence: Synthetic peptide
RDKPTDQEEQNWSFYEWFRH

SEQ ID NO: 1233 - protein, 20 aa, Artificial Sequence
  Description of Artificial Sequence: Synthetic peptide
SRDQTNFTFNSAGFYGWFER

SEQ ID NO: 1234 - protein, 20 aa, Artificial Sequence
  Description of Artificial Sequence: Synthetic peptide
GAFYRWFHEALVGSERVPDV

SEQ ID NO: 1235 - protein, 20 aa, Artificial Sequence
  Description of Artificial Sequence: Synthetic peptide
RIGGGWARSEGFYEWFVREL

SEQ ID NO: 1236 - protein, 20 aa, Artificial Sequence
  Description of Artificial Sequence: Synthetic peptide
RMFYEWFWSQMGAGPTEGSA

SEQ ID NO: 1237 - protein, 20 aa, Artificial Sequence
  Description of Artificial Sequence: Synthetic peptide
HEAFYDWFSALVDGGYELMG

SEQ ID NO: 1238 - protein, 20 aa, Artificial Sequence
  Description of Artificial Sequence: Synthetic peptide
FYGWFSRQLSLTPRDDWGLP

SEQ ID NO: 1239 - protein, 17 aa, Artificial Sequence
  Description of Artificial Sequence: Synthetic peptide
GVGTLTMSSDAFYTWFV

SEQ ID NO: 1240 - protein, 20 aa, Artificial Sequence
  Description of Artificial Sequence: Synthetic peptide
LGTSAGQGVGHRAFYQWFQS

SEQ ID NO: 1241 - protein, 23 aa, Artificial Sequence
  Description of Artificial Sequence: Synthetic peptide
ETLESHYVVPQAALDRLFYSWFS

SEQ ID NO: 1242 - protein, 40 aa, Artificial Sequence; identical to SEQ ID NO: 1
  Description of Artificial Sequence: Synthetic peptide

SEQ ID NO: 1243 - protein, 40 aa, Artificial Sequence; identical to SEQ ID NO: 2
  Description of Artificial Sequence: Synthetic peptide

SEQ ID NO: 1244 - protein, 20 aa, Artificial Sequence
  Description of Artificial Sequence: Synthetic peptide
EIEAEWGRVRCLVYGRCVGG

SEQ ID NO: 1245 - protein, 20 aa, Artificial Sequence
  Description of Artificial Sequence: Synthetic peptide
WLDQEWAWVQCEVYGRGCPS

SEQ ID NO: 1246 - protein, 24 aa, Artificial Sequence
  Description of Artificial Sequence: Synthetic peptide
DYKDFYDAIDQLVRGSARAGGTRD

SEQ ID NO: 1247 - protein, 24 aa, Artificial Sequence
  Description of Artificial Sequence: Synthetic peptide
DYKDDRAFYNGLRDLVGAVYGAWD

SEQ ID NO: 1248 - protein, 24 aa, Artificial Sequence
  Description of Artificial Sequence: Synthetic peptide
DYKDRLFYCGIQALGANLGYSGCV

SEQ ID NO: 1249 - protein, 19 aa, Artificial Sequence
  Description of Artificial Sequence: Synthetic peptide
DYKDFYSALWGLCGVTGCG

SEQ ID NO: 1250 - protein, 20 aa, Artificial Sequence
  Description of Artificial Sequence: Synthetic peptide
RGQSDAFYSGLWALIGLSDG

SEQ ID NO: 1251 - protein, 41 aa, Artificial Sequence
  Description of Artificial Sequence: Synthetic peptide
RYFPFGGFYGNLDVLRWLRPYVASPRWGHWRPGGSLGKQPT

SEQ ID NO: 1252 - protein, 20 aa, Artificial Sequence
  Description of Artificial Sequence: Synthetic peptide
PFGFGGRWWGIPRMWWYRNS

SEQ ID NO: 1253 - protein, 20 aa, Artificial Sequence
  Description of Artificial Sequence: Synthetic peptide
WWWGGRNRWWLERWGLGGER

SEQ ID NO: 1254 - protein, 20 aa, Artificial Sequence
  Description of Artificial Sequence: Synthetic peptide
LGPLLRWGSEVCGVWPDLCE

SEQ ID NO: 1255 - protein, 20 aa, Artificial Sequence
  Description of Artificial Sequence: Synthetic peptide
GRVALWGPVWPRWWFMSRPV

SEQ ID NO: 1256 - protein, 20 aa, Artificial Sequence
  Description of Artificial Sequence: Synthetic peptide
SMFVAGSDRWPGYGVLADWL

SEQ ID NO: 1257 - protein, 20 aa, Artificial Sequence
  Description of Artificial Sequence: Synthetic peptide
VRGFQGGTVWPGYEWLRNAA

SEQ ID NO: 1258 - protein, 20 aa, Artificial Sequence
  Description of Artificial Sequence: Synthetic peptide
WPGYLFFEEALQDWRGSTED

SEQ ID NO: 1259 - protein, 20 aa, Artificial Sequence
  Description of Artificial Sequence: Synthetic peptide
ACSSFFVKGPEGFLQCLGSI

SEQ ID NO: 1260 - protein, 20 aa, Artificial Sequence
  Description of Artificial Sequence: Synthetic peptide
HLCVLEELFWGASLFGYCSG

SEQ ID NO: 1261 - protein, 36 aa, Artificial Sequence
  Description of Artificial Sequence: Synthetic peptide
PERGRGLRTAMQLMRRPRDWHFPHSLFWGAPPPLSG

SEQ ID NO: 1262 - protein, 36 aa, Artificial Sequence
  Description of Artificial Sequence: Synthetic peptide
PAMAVGYPQPCAKSTYERGRGSALESRCYQAAAGAP

SEQ ID NO: 1263 - protein, 36 aa, Artificial Sequence
  Description of Artificial Sequence: Synthetic peptide
  MOD_RES (9): Unknown amino acid; translation read-through at TGA stop codon
PAMACKVCXCCSVSCYDGFPRSGAHPGRRWAAAGAP

SEQ ID NO: 1264 - protein, 36 aa, Artificial Sequence
  Description of Artificial Sequence: Synthetic peptide
PAMAFKVSLSCGESFYEWFAGLVRDPTCGWTAAGAP

SEQ ID NO: 1265 - protein, 33 aa, Artificial Sequence
  Description of Artificial Sequence: Synthetic peptide
  MOD_RES (14): Unknown amino acid; translation read-through at TGA stop codon
AGHGACEFQVMFGXLVHLLGFPGRLGKGLAAGA

SEQ ID NO: 1266 - protein, 36 aa, Artificial Sequence
  Description of Artificial Sequence: Synthetic peptide
  MOD_RES (29): Unknown amino acid; translation read-through at TGA stop codon
RPWRGSWLRLVGRRVECYCAERGATRGWXCAAAGAP

SEQ ID NO: 1267 - protein, 36 aa, Artificial Sequence
  Description of Artificial Sequence: Synthetic peptide
AGHGDFGALSCKAAVVAWVPVQTAGLRVRVAAAGAP

SEQ ID NO: 1268 - protein, 36 aa, Artificial Sequence
  Description of Artificial Sequence: Synthetic peptide
PAMAPRLYQGCPESFYAWTAGHVSPALYGWAAAGAP

SEQ ID NO: 1269 - protein, 36 aa, Artificial Sequence
  Description of Artificial Sequence: Synthetic peptide
  MOD_RES (22): Unknown amino acid; translation read-through at TAA stop codon
PGHGVSVRAGVSGMLRREVAGXCVSAWEGLCGRRCA

SEQ ID NO: 1270 - protein, 36 aa, Artificial Sequence
  Description of Artificial Sequence: Synthetic peptide
  MOD_RES (10): Unknown amino acid; translation read-through at TAA stop codon
  MOD_RES (24): Unknown amino acid; translation read-through at TAA stop codon
  MOD_RES (30): Unknown amino acid; translation read-through at TAA stop codon
PAMAGMDPQXCTVASSRWFASPVXVVWRCXAAAGAP

SEQ ID NO: 1271 - protein, 36 aa, Artificial Sequence
  Description of Artificial Sequence: Synthetic peptide
PAMAGMFSQTCPEGFYGWFAGQASDSSLCRAAAGAP

SEQ ID NO: 1272 - protein, 36 aa, Artificial Sequence
  Description of Artificial Sequence: Synthetic peptide
  MOD_RES (16): Unknown amino acid; translation read-through at TGA stop codon
  MOD_RES (27): Unknown amino acid; translation read-through at TAA stop codon
PAMAPLGFRSCAGAYXVGCGRRVAFEXRCWAAAGAP

SEQ ID NO: 1273 - protein, 36 aa, Artificial Sequence
  Description of Artificial Sequence: Synthetic peptide
  MOD_RES (19): Unknown amino acid; translation read-through at TAA stop codon
PAMAGILCPSCPHFLVDSXAAQDAAGQWPSAAAGAP

SEQ ID NO: 1274 - protein, 36 aa, Artificial Sequence
  Description of Artificial Sequence: Synthetic peptide
PAMARRIPRECGDSFYVGLRWLVENPRSDWAAAGAP

SEQ ID NO: 1275 - protein, 36 aa, Artificial Sequence
  Description of Artificial Sequence: Synthetic peptide
PAMADRIGVQCPDSFYGWFAVQEPGTSGGLAAAGAP

SEQ ID NO: 1276 - protein, 31 aa, Artificial Sequence
  Description of Artificial Sequence: Synthetic peptide
  MOD_RES (9): Unknown amino acid; translation read-through at TGA stop codon
PAMAGLPSXSCRVAMYKGQAAWSCSAAAGAP

SEQ ID NO: 1277 - protein, 35 aa, Artificial Sequence
  Description of Artificial Sequence: Synthetic peptide
RPWRLILVTLVREASMTGSGVWYPRRGGAGPAEGA

SEQ ID NO: 1278 - protein, 36 aa, Artificial Sequence
  Description of Artificial Sequence: Synthetic peptide
  MOD_RES (22): Unknown amino acid; translation read-through at TGA stop codon
  MOD_RES (29): Unknown amino acid; translation read-through at TAA stop codon
PAMAGSARQVCVDGVVGWREGXVVDQWLXRAAAGAP

SEQ ID NO: 1279 - protein, 36 aa, Artificial Sequence
  Description of Artificial Sequence: Synthetic peptide
PAMAGIMQRACEGGFTDCLWSLISGASSGRAAAGAP

SEQ ID NO: 1280 - protein, 36 aa, Artificial Sequence
  Description of Artificial Sequence: Synthetic peptide
RPWRVSSLRHVRVTCGELFGGQVSELFCLCAAAGAP

SEQ ID NO: 1281 - protein, 36 aa, Artificial Sequence
  Description of Artificial Sequence: Synthetic peptide
  MOD_RES (28): Unknown amino acid; translation read-through at TAA stop codon
PAMAGLIYMSCLAYFDDLIERRLEKPGXRFAAAGAP

SEQ ID NO: 1282 - protein, 36 aa, Artificial Sequence
  Description of Artificial Sequence: Synthetic peptide
PAMAGIMPQSCGETSGKCMRGQVSLRWRWSAAAGAP

SEQ ID NO: 1283 - protein, 36 aa, Artificial Sequence
  Description of Artificial Sequence: Synthetic peptide
PAMAFILPRSCEDYLYDFLASKVVHVFRSLAAAGAP

SEQ ID NO: 1284 - protein, 35 aa, Artificial Sequence
  Description of Artificial Sequence: Synthetic peptide
PAMACMSSQPCGESFYDWFAGQVRDPGWESAAAGA

SEQ ID NO: 1285 - protein, 35 aa, Artificial Sequence
  Description of Artificial Sequence: Synthetic peptide
  MOD_RES (16): Unknown amino acid; translation read-through at TGA stop codon
  MOD_RES (30): Unknown amino acid; translation read-through at TAA stop codon
RPWRGWAIRGVRHRCXGAWRGQVAQELCRXAAAGA

SEQ ID NO: 1286 - protein, 36 aa, Artificial Sequence
  Description of Artificial Sequence: Synthetic peptide
PAMAGIASHTCPGGFYEWFACQSRAPGWDGAAAGAP

SEQ ID NO: 1287 - protein, 36 aa, Artificial Sequence
  Description of Artificial Sequence: Synthetic peptide
PAMAGRIARACPDSMFGWLAGQGSQQSGWQAAAGAP

SEQ ID NO: 1288 - protein, 36 aa, Artificial Sequence
  Description of Artificial Sequence: Synthetic peptide
  MOD_RES (12): Unknown amino acid; translation read-through at TAA stop codon
PAMARPISPLCXRRSKDEDASRVSLPGFFCAAAGAP

SEQ ID NO: 1289 - protein, 43 aa, Artificial Sequence
  Description of Artificial Sequence: Synthetic peptide
PAMADYKDDDDKTFYACLASLMAGTPRQYRTPWARCPAAAGAP

SEQ ID NO: 1290 - protein, 36 aa, Artificial Sequence
  Description of Artificial Sequence: Synthetic peptide
  MOD_RES (13): Unknown amino acid; translation read-through at TAA stop codon
  MOD_RES (29): Unknown amino acid; translation read-through at TGA stop codon
RPWRVNTSESCLXFVCSLFSGYECWVGGXWAAAGAP

SEQ ID NO: 1291 - protein, 36 aa, Artificial Sequence
  Description of Artificial Sequence: Synthetic peptide
PAMAGMGVQSCHDSFYGWFGCLFSDAEGDRAAAGAP

SEQ ID NO: 1292 - protein, 36 aa, Artificial Sequence
  Description of Artificial Sequence: Synthetic peptide
  MOD_RES (18): Unknown amino acid
PAMAGDTSRACPESLNGXFCVVGVALRRWIAAAGAP

SEQ ID NO: 1293 - protein, 36 aa, Artificial Sequence
  Description of Artificial Sequence: Synthetic peptide
PAMARWWRGLCGERWYHRGWVQVQFPWERGAAAGAP

SEQ ID NO: 1294 - protein, 34 aa, Artificial Sequence
  Description of Artificial Sequence: Synthetic peptide
RPWRVPWVLEMPEYGNANLVFYDALQRLAAAGAP

SEQ ID NO: 1295 - protein, 36 aa, Artificial Sequence
  Description of Artificial Sequence: Synthetic peptide
AGHGVCYLAGVFGEALGGGRVSGFAIGQVRAAAGAP

SEQ ID NO: 1296 - protein, 36 aa, Artificial Sequence
  Description of Artificial Sequence: Synthetic peptide
PAMAGRIKEFCSRSFYDQVACLVKGPSWGGAAAGAP

SEQ ID NO: 1297 - protein, 36 aa, Artificial Sequence; identical to SEQ ID NO: 1296
  Description of Artificial Sequence: Synthetic peptide

SEQ ID NO: 1298 - protein, 36 aa, Artificial Sequence
  Description of Artificial Sequence: Synthetic peptide
PAMAGISSRSCAENLRFGRAWQGSDVWDCLAAAGAP

SEQ ID NO: 1299 - protein, 36 aa, Artificial Sequence
  Description of Artificial Sequence: Synthetic peptide
PAMASRIPQWCRDSFYEWFECQLLGPRESRAAAGAP

SEQ ID NO: 1300 - protein, 36 aa, Artificial Sequence
  Description of Artificial Sequence: Synthetic peptide
PAMAGAESCYRAKSFYDGLGCLVGEAWWGGAAAGAP

SEQ ID NO: 1301 - protein, 36 aa, Artificial Sequence
  Description of Artificial Sequence: Synthetic peptide
PAMARSGAPRCHDPFYEWFAVEAQEPLRCEAAAGAP

SEQ ID NO: 1302 - protein, 36 aa, Artificial Sequence; identical to SEQ ID NO: 1291
  Description of Artificial Sequence: Synthetic peptide

SEQ ID NO: 1303 - protein, 36 aa, Artificial Sequence
  Description of Artificial Sequence: Synthetic peptide
PAMADISFESCLAQLLGWRAGEGSKRLWRCAAAGAP

SEQ ID NO: 1304 - protein, 36 aa, Artificial Sequence
  Description of Artificial Sequence: Synthetic peptide
PAMANTFLYPCRDPFYHSLADLVGVAMQCGAAAGAP

SEQ ID NO: 1305 - protein, 36 aa, Artificial Sequence
  Description of Artificial Sequence: Synthetic peptide
PAMARRIPRECGDSFYAGLRCLVESPRSDWAAAGAP

SEQ ID NO: 1306 - protein, 36 aa, Artificial Sequence
  Description of Artificial Sequence: Synthetic peptide
PAMASIVCPFCEDSFYNWFAAQVADTRGLWAAAGAP

SEQ ID NO: 1307 - protein, 36 aa, Artificial Sequence
  Description of Artificial Sequence: Synthetic peptide
PAMAWSHSHAYTESYYDWFAAQVLSAGSGRAAAGAP

SEQ ID NO: 1308 - protein, 36 aa, Artificial Sequence; identical to SEQ ID NO: 1296
  Description of Artificial Sequence: Synthetic peptide

SEQ ID NO: 1309 - protein, 36 aa, Artificial Sequence
  Description of Artificial Sequence: Synthetic peptide
PAMARSRPPACGDSFYGWFECEVSGLGRRGAAAGAP

SEQ ID NO: 1310 - protein, 36 aa, Artificial Sequence
  Description of Artificial Sequence: Synthetic peptide
PAMAGISYPACEESFYDCLASLVLSPWGSGAAAGAP

SEQ ID NO: 1311 - protein, 36 aa, Artificial Sequence; identical to SEQ ID NO: 1296
  Description of Artificial Sequence: Synthetic peptide

SEQ ID NO: 1312 - protein, 36 aa, Artificial Sequence
  Description of Artificial Sequence: Synthetic peptide
PAMAVVAGQYCRDSFYDRLSALVGDAWRCGAAAGAP

SEQ ID NO: 1313 - protein, 36 aa, Artificial Sequence
  Description of Artificial Sequence: Synthetic peptide
PAMACTASRFCAVSFYEWFAAQLPDLGGDSAAAGAP

SEQ ID NO: 1314 - protein, 36 aa, Artificial Sequence
  Description of Artificial Sequence: Synthetic peptide
PAMAGITLQSCGGGFYELLASVVGDTGCRLAAAGAP

SEQ ID NO: 1315 - protein, 36 aa, Artificial Sequence
  Description of Artificial Sequence: Synthetic peptide
PAMAGYICRSCQGSFYGCLAALVRDPRCSRAAAGAP

SEQ ID NO: 1316 - protein, 36 aa, Artificial Sequence; identical to SEQ ID NO: 1296
  Description of Artificial Sequence: Synthetic peptide

SEQ ID NO: 1317 - protein, 36 aa, Artificial Sequence
  Description of Artificial Sequence: Synthetic peptide
RPWRVAGAPRCHDPFYEWFAVEAQEPLRCEAAAGAP

SEQ ID NO: 1318 - protein, 36 aa, Artificial Sequence; identical to SEQ ID NO: 1291
  Description of Artificial Sequence: Synthetic peptide

SEQ ID NO: 1319 - protein, 36 aa, Artificial Sequence
  Description of Artificial Sequence: Synthetic peptide
PAMASICGQSCRDPFYAGLRGLLLEPLQLGAAAGAP

SEQ ID NO: 1320 - protein, 36 aa, Artificial Sequence
  Description of Artificial Sequence: Synthetic peptide
PAMAGVMSKCCSGSFYDWLADLVPEASWSWAAAGAP

SEQ ID NO: 1321 - protein, 36 aa, Artificial Sequence
  Description of Artificial Sequence: Synthetic peptide
PAMASFSGEACGGSFYDCLAGLMRDSSVSRAAAGAP

SEQ ID NO: 1322 - protein, 36 aa, Artificial Sequence
  Description of Artificial Sequence: Synthetic peptide
PAMASFSFYTCMETLLDGFGGQAFNRCRRTAAAGAP

SEQ ID NO: 1323 - protein, 36 aa, Artificial Sequence
  Description of Artificial Sequence: Synthetic peptide
PAMARVIYPTCPRDFYGGLAALVFGPHVCGAAAGAP

SEQ ID NO: 1324 - protein, 36 aa, Artificial Sequence
  Description of Artificial Sequence: Synthetic peptide
PAMAGIGSQACTDPFYYWFEGLVSNGGWCRAAAGAP

SEQ ID NO: 1325 - protein, 36 aa, Artificial Sequence; identical to SEQ ID NO: 1296
  Description of Artificial Sequence: Synthetic peptide

SEQ ID NO: 1326 - protein, 36 aa, Artificial Sequence; identical to SEQ ID NO: 1300
  Description of Artificial Sequence: Synthetic peptide

SEQ ID NO: 1327 - protein, 36 aa, Artificial Sequence
  Description of Artificial Sequence: Synthetic peptide
PAMADMMSQVCSQSMTGRFSVDFYDGLRCLAAAGAP

SEQ ID NO: 1328 - protein, 36 aa, Artificial Sequence; identical to SEQ ID NO: 1305
  Description of Artificial Sequence: Synthetic peptide

SEQ ID NO: 1329 - protein, 36 aa, Artificial Sequence
  Description of Artificial Sequence: Synthetic peptide
PAMARVIQEACGGSFYDGLACLVYPQGWRGAAAGAP

SEQ ID NO: 1330 - protein, 36 aa, Artificial Sequence
  Description of Artificial Sequence: Synthetic peptide
PAMAGGRSVACQESFYALLGCVVMGPGGGSAAAGAP

SEQ ID NO: 1331 - protein, 36 aa, Artificial Sequence
  Description of Artificial Sequence: Synthetic peptide
PAMAGISFRSCLQALIAGSAGNASEMGCRSAAAGAP

SEQ ID NO: 1332 - protein, 36 aa, Artificial Sequence
  Description of Artificial Sequence: Synthetic peptide
PAMAGIRDSYCQGAFYDWFAGLVDDGLFCQAAAGAP

SEQ ID NO: 1333 - protein, 36 aa, Artificial Sequence
  Description of Artificial Sequence: Synthetic peptide
PAMAGISYQSCEDSFYAWFACTVLDTRGGGAAAGAP

SEQ ID NO: 1334 - protein, 36 aa, Artificial Sequence
  Description of Artificial Sequence: Synthetic peptide
PAMARVIYEACGGSFYDGLACLVYPQGWRGAAAGAP

SEQ ID NO: 1335 - protein, 36 aa, Artificial Sequence
  Description of Artificial Sequence: Synthetic peptide
PAMADMPLLECLDPFYSWFAGQVSDPRFCGAAAGAP

SEQ ID NO: 1336 - protein, 36 aa, Artificial Sequence; identical to SEQ ID NO: 1329
  Description of Artificial Sequence: Synthetic peptide

SEQ ID NO: 1337 - protein, 36 aa, Artificial Sequence; identical to SEQ ID NO: 1296
  Description of Artificial Sequence: Synthetic peptide

SEQ ID NO: 1338 - protein, 36 aa, Artificial Sequence
  Description of Artificial Sequence: Synthetic peptide
PAMAHISFHSCLEALQDPEWGQPSAAWRNCAAAGAP

SEQ ID NO: 1339 - protein, 36 aa, Artificial Sequence
  Description of Artificial Sequence: Synthetic peptide
PAMAMTAQESCPDSFYECLAVLVGDRWGGWAAAGAP

SEQ ID NO: 1340 - protein, 36 aa, Artificial Sequence; identical to SEQ ID NO: 1338
  Description of Artificial Sequence: Synthetic peptide

SEQ ID NO: 1341 - protein, 36 aa, Artificial Sequence
  Description of Artificial Sequence: Synthetic peptide
PAMAGTISQCCEENFYAGLAHLAGVGQWGCAAAGAP

SEQ ID NO: 1342 - protein, 29 aa, Artificial Sequence
  Description of Artificial Sequence: Synthetic peptide
DDDKTFYACLEFLLSGNPEGNSGPWDRCR

SEQ ID NO: 1343 - protein, 29 aa, Artificial Sequence
  Description of Artificial Sequence: Synthetic peptide
DDDKIFYSCLASLLHGGPQRNTGPWERCR

SEQ ID NO: 1344 - protein, 29 aa, Artificial Sequence
  Description of Artificial Sequence: Synthetic peptide
DDDKTFYSCLASLLTGPREQNRGAWERCR

SEQ ID NO: 1345 - protein, 29 aa, Artificial Sequence
  Description of Artificial Sequence: Synthetic peptide
DDDKSFYSCLASLLTASRLPSRGAWDGCH

SEQ ID NO: 1346 - protein, 29 aa, Artificial Sequence
  Description of Artificial Sequence: Synthetic peptide
DDDKSFYSCLGSLLTGAPQPIRGAWDRCR

SEQ ID NO: 1347 - protein, 29 aa, Artificial Sequence
  Description of Artificial Sequence: Synthetic peptide
DDDKSFYSCLASLWSGTGGSSRGRWEGCR

SEQ ID NO: 1348 - protein, 29 aa, Artificial Sequence
  Description of Artificial Sequence: Synthetic peptide
DDDKTFYSCLGALLAGTGERNLRPWGRCR

SEQ ID NO: 1349 - protein, 29 aa, Artificial Sequence
  Description of Artificial Sequence: Synthetic peptide
DDDKTFYSCLGSLLTGPSDPKRGPWGGCR

SEQ ID NO: 1350 - protein, 29 aa, Artificial Sequence
  Description of Artificial Sequence: Synthetic peptide
DDDKTFYKCLASVLTGSTQTKRRPWEGCR

SEQ ID NO: 1351 - protein, 29 aa, Artificial Sequence
  Description of Artificial Sequence: Synthetic peptide
DDDKPFYSCLATLLTDPPQSQRGAWGRCR

SEQ ID NO: 1352 - protein, 29 aa, Artificial Sequence
  Description of Artificial Sequence: Synthetic peptide
DDDKSFYSCLAALLTGSSQSSGGAWMLCR

SEQ ID NO: 1353 - protein, 29 aa, Artificial Sequence
  Description of Artificial Sequence: Synthetic peptide
DDDKSFYSCLASLVAGTPWPKGGSWERCR

SEQ ID NO: 1354 - protein, 29 aa, Artificial Sequence
  Description of Artificial Sequence: Synthetic peptide
DDDKSFYSCLASLVTGIPRSNSGTQVFCR

SEQ ID NO: 1355 - protein, 29 aa, Artificial Sequence
  Description of Artificial Sequence: Synthetic peptide
DDDKSFYSCMASLLTGTPESRRGMGERCG

SEQ ID NO: 1356 - protein, 29 aa, Artificial Sequence
  Description of Artificial Sequence: Synthetic peptide
DDDKAFYSCLASLLTGSPPAQGGPWDRCR

SEQ ID NO: 1357 - protein, 29 aa, Artificial Sequence
  Description of Artificial Sequence: Synthetic peptide
DDDKFFYSCLASLLSDTPQRRRGPGVRCR

SEQ ID NO: 1358 - protein, 29 aa, Artificial Sequence
  Description of Artificial Sequence: Synthetic peptide
DDDKTFYSCLASLLAGNPQPNRAGWEYCR

SEQ ID NO: 1359 - protein, 29 aa, Artificial Sequence
  Description of Artificial Sequence: Synthetic peptide
DDDKTFYSCLGSLLLGPPQKNPGPGERCR

SEQ ID NO: 1360 - protein, 29 aa, Artificial Sequence
  Description of Artificial Sequence: Synthetic peptide
DDDKMFYSCLESLLIGRWPRNGGSLSRCR

SEQ ID NO: 1361 - protein, 29 aa, Artificial Sequence
  Description of Artificial Sequence: Synthetic peptide
DDDKSFYSCLTFLLTGTPQANDASWERCR

SEQ ID NO: 1362 - protein, 29 aa, Artificial Sequence
  Description of Artificial Sequence: Synthetic peptide
DDDKSFYSCMAALLSGAPQKSRGRWERCG

SEQ ID NO: 1363 - protein, 29 aa, Artificial Sequence
  Description of Artificial Sequence: Synthetic peptide
DDDKAFYRCLAYLLAGRPQASGGGGVRCR

SEQ ID NO: 1364 - protein, 29 aa, Artificial Sequence
  Description of Artificial Sequence: Synthetic peptide
DDDKAFYSCLAALRERSPQMSRGTWGGCR

SEQ ID NO: 1365 - protein, 29 aa, Artificial Sequence
  Description of Artificial Sequence: Synthetic peptide
DDDKTFYACLAALLGGTAELHDGSLECRG

SEQ ID NO: 1366 - protein, 29 aa, Artificial Sequence
  Description of Artificial Sequence: Synthetic peptide
DDDKTFYSCLGSLLTGTLPPARGARNICR

SEQ ID NO: 1367 - protein, 29 aa, Artificial Sequence
  Description of Artificial Sequence: Synthetic peptide
DDDKTFYSCLSSLLAGSPLPRRDLWAGCR

SEQ ID NO: 1368 - protein, 29 aa, Artificial Sequence
  Description of Artificial Sequence: Synthetic peptide
DDDKAFYSCMASLLAGTPEAQGSAWVRCR

SEQ ID NO: 1369 - protein, 29 aa, Artificial Sequence
  Description of Artificial Sequence: Synthetic peptide
DDDKNFYACMESLVSVAPPSSRDPFECRR

SEQ ID NO: 1370 - protein, 29 aa, Artificial Sequence
  Description of Artificial Sequence: Synthetic peptide
  MOD_RES (19): Unknown amino acid
DDDKSFYSCLASLVSGTAXPNRGPWERCR

SEQ ID NO: 1371 - protein, 29 aa, Artificial Sequence
  Description of Artificial Sequence: Synthetic peptide
DDDKIFYSCLASLLDDTAQSRRGQWARCR

SEQ ID NO: 1372 - protein, 29 aa, Artificial Sequence
  Description of Artificial Sequence: Synthetic peptide
DDDKIFYSCLGALLSGTPQTSHVTSGRCR

SEQ ID NO: 1373 - protein, 29 aa, Artificial Sequence
  Description of Artificial Sequence: Synthetic peptide
TDDKTFYFCLASLLAGTQQQSRGAWERCG

SEQ ID NO: 1374 - protein, 29 aa, Artificial Sequence
  Description of Artificial Sequence: Synthetic peptide
DDDKAFYSCLASVLTGSPHPGRSRWERCR

SEQ ID NO: 1375 - protein, 29 aa, Artificial Sequence
  Description of Artificial Sequence: Synthetic peptide
DDDKTFYSCLESMLTGTPPPCRGHGERGR

SEQ ID NO: 1376 - protein, 29 aa, Artificial Sequence
  Description of Artificial Sequence: Synthetic peptide
DDDKTFESCLEALVSGGSRRERGLWYRCR

SEQ ID NO: 1377 - protein, 29 aa, Artificial Sequence
  Description of Artificial Sequence: Synthetic peptide
DDDKAFYSCLSSLLAGTRERHRDTWPRCG

SEQ ID NO: 1378 - protein, 29 aa, Artificial Sequence
  Description of Artificial Sequence: Synthetic peptide
DDDKTFHSCLAALVTGTPQQKRGPWERCR

SEQ ID NO: 1379 - protein, 29 aa, Artificial Sequence
  Description of Artificial Sequence: Synthetic peptide
DDDKTFYLCLASLQTVTRLGDRVPWERCR

SEQ ID NO: 1380 - protein, 29 aa, Artificial Sequence
  Description of Artificial Sequence: Synthetic peptide
DDDKTFYSCLVSLLNGTAKPNRGQWEGCR

SEQ ID NO: 1381 - protein, 29 aa, Artificial Sequence
  Description of Artificial Sequence: Synthetic peptide
DDDKSFYSCLASLSNCTPGLLRCQWERCR

SEQ ID NO: 1382 - protein, 29 aa, Artificial Sequence
  Description of Artificial Sequence: Synthetic peptide
DDDKTFYSCLSSLLASTPQPNRGAWLCRR

SEQ ID NO: 1383 - protein, 29 aa, Artificial Sequence
  Description of Artificial Sequence: Synthetic peptide
DDDKSFYSCLASLSNCTPGLLRCQWERCR

SEQ ID NO: 1384 - protein, 29 aa, Artificial Sequence
  Description of Artificial Sequence: Synthetic peptide
DDDKTFYSCLGALLSGAPQTYRGPGAGCR

SEQ ID NO: 1385 - protein, 29 aa, Artificial Sequence
  Description of Artificial Sequence: Synthetic peptide
DDDKTFYSCLVSLLNGTAKPNRGQWEGCR

SEQ ID NO: 1386 - protein, 29 aa, Artificial Sequence
  Description of Artificial Sequence: Synthetic peptide
DDDKHFYSCLSSLLTAPPQSTRGPAGRHC

SEQ ID NO: 1387 - protein, 29 aa, Artificial Sequence
  Description of Artificial Sequence: Synthetic peptide
DDDKTFYSCLASLLNGNTQPNGGQWVRCR

SEQ ID NO: 1388 - protein, 29 aa, Artificial Sequence
  Description of Artificial Sequence: Synthetic peptide
DDDKVFYTCLASLSTGTPQRQSGEWQRCR

SEQ ID NO: 1389 - protein, 29 aa, Artificial Sequence
  Description of Artificial Sequence: Synthetic peptide
DDDKTFYSCLVSLLNGTAKPNRGQWEGCR

SEQ ID NO: 1390 - protein, 29 aa, Artificial Sequence
  Description of Artificial Sequence: Synthetic peptide
DDDKPFYSCLASLIQGTPLPERGMWERCR

SEQ ID NO: 1391 - protein, 28 aa, Artificial Sequence
  Description of Artificial Sequence: Synthetic peptide
DDDKTFYSCVSWLLTGARQRDGVWERCR

SEQ ID NO: 1392 - protein, 29 aa, Artificial Sequence
  Description of Artificial Sequence: Synthetic peptide
DDDKTFYSCLVSLLNGTAKPNRGQWEGCR

SEQ ID NO: 1393 - protein, 29 aa, Artificial Sequence
  Description of Artificial Sequence: Synthetic peptide
DDDKAFYGCLAALLTGARQPSRGVGERCF

SEQ ID NO: 1394 - protein, 29 aa, Artificial Sequence
  Description of Artificial Sequence: Synthetic peptide
DDDKTFYSCLVSLLNGTAKPNRGQWEGCR

SEQ ID NO: 1395 - protein, 29 aa, Artificial Sequence
  Description of Artificial Sequence: Synthetic peptide
DDDKTFYSCLASLLAGSPQPKRAGWEYCR

SEQ ID NO: 1396 - protein, 29 aa, Artificial Sequence
  Description of Artificial Sequence: Synthetic peptide
DDDKPFYSCLESLVTGRPQADRGVWERCR

SEQ ID NO: 1397 - protein, 29 aa, Artificial Sequence
  Description of Artificial Sequence: Synthetic peptide
DDDKTFYSCLTSLSRGSAHGLSGRWERCR

SEQ ID NO: 1398 - protein, 30 aa, Artificial Sequence
  Description of Artificial Sequence: Synthetic peptide
DDDDKTFYFCLATLLTGPPVPNREPWACYR

SEQ ID NO: 1399 - protein, 29 aa, Artificial Sequence
  Description of Artificial Sequence: Synthetic peptide
DDDKIFYSCLRTLGTNPPEPVRGPFDRCG

SEQ ID NO: 1400 - protein, 29 aa, Artificial Sequence
  Description of Artificial Sequence: Synthetic peptide
DDDKTFYSCLVSLLNGTAKPNRGQWEGCR

SEQ ID NO: 1401 - protein, 29 aa, Artificial Sequence
  Description of Artificial Sequence: Synthetic peptide
NDDKSFYSCVASLVNEGPSQVGVLGERCR

SEQ ID NO: 1402 - protein, 29 aa, Artificial Sequence
  Description of Artificial Sequence: Synthetic peptide
DDDKTFYSCLASMLTGPPHPDRVPWDRCR

SEQ ID NO: 1403 - protein, 29 aa, Artificial Sequence
  Description of Artificial Sequence: Synthetic peptide
DDDKKFYSCLVELVNGTSPPARGLWERCR

SEQ ID NO: 1404 - protein, 29 aa, Artificial Sequence
  Description of Artificial Sequence: Synthetic peptide
DDDKVFYSCLESLVSGTPEVNGRAWERCR

SEQ ID NO: 1405 - protein, 29 aa, Artificial Sequence
  Description of Artificial Sequence: Synthetic peptide
YDDKRFYYCLASLASGTLQTNREQWERCR

SEQ ID NO: 1406 - protein, 29 aa, Artificial Sequence
  Description of Artificial Sequence: Synthetic peptide
DDDKTFYSCLESLLNGTPQRNRGQWDPCS

SEQ ID NO: 1407 - protein, 29 aa, Artificial Sequence
  Description of Artificial Sequence: Synthetic peptide
DDDKTFYTCLQALITGYERPVGGRWESCR

SEQ ID NO: 1408 - protein, 29 aa, Artificial Sequence
  Description of Artificial Sequence: Synthetic peptide
DDDKAFYSCLATLLYGNPPSSRGQWHRCR

SEQ ID NO: 1409 - protein, 29 aa, Artificial Sequence
  Description of Artificial Sequence: Synthetic peptide
DDDKVFYSCLESLVSGTPEVNGRAWERCR

SEQ ID NO: 1410 - protein, 29 aa, Artificial Sequence
  Description of Artificial Sequence: Synthetic peptide
GDDKTFYACLSSLLYGTADWSQGQRDRCR

SEQ ID NO: 1411 - protein, 29 aa, Artificial Sequence
  Description of Artificial Sequence: Synthetic peptide
DDDKSFYSCMESLWTDTPQPNRGRWERCR

SEQ ID NO: 1412 - protein, 29 aa, Artificial Sequence
  Description of Artificial Sequence: Synthetic peptide
DDDKTFYSCLASLLTVSPEPSRGPWERCR

SEQ ID NO: 1413 - protein, 29 aa, Artificial Sequence
  Description of Artificial Sequence: Synthetic peptide
DDDKTFYSCMVQLLTGTPEKSCVTWERWR

SEQ ID NO: 1414 - protein, 29 aa, Artificial Sequence
  Description of Artificial Sequence: Synthetic peptide
DDDKTFYSCLVSLLNGTAKPNRGQWEGCR

SEQ ID NO: 1415 - protein, 29 aa, Artificial Sequence
  Description of Artificial Sequence: Synthetic peptide
DDDKTFYSCVASLVVGTAQPQCGPWQGWG

SEQ ID NO: 1416 - protein, 29 aa, Artificial Sequence
  Description of Artificial Sequence: Synthetic peptide
DDDKTFYSCLAGLVTGPPRQNWGAGDACR

SEQ ID NO: 1417 - protein, 29 aa, Artificial Sequence
  Description of Artificial Sequence: Synthetic peptide
DDDKTFYSCMSSLSTTAPQPKSGRWDRCR

SEQ ID NO: 1418 - protein, 29 aa, Artificial Sequence
  Description of Artificial Sequence: Synthetic peptide
DDDKTFYSCLASLVNGSLQPNRAPGELCR

SEQ ID NO: 1419 - protein, 29 aa, Artificial Sequence
  Description of Artificial Sequence: Synthetic peptide
DDDKTFYSCLVSLLNGTAKPNRGQWEGCR

SEQ ID NO: 1420 - protein, 29 aa, Artificial Sequence
  Description of Artificial Sequence: Synthetic peptide
DDDKTFYSCLVSLLNGTAKPNRGQWEGCR

SEQ ID NO: 1421 - protein, 29 aa, Artificial Sequence
  Description of Artificial Sequence: Synthetic peptide
DDDKSFYSCLESLLNGGPQQKRGPWEGCR

SEQ ID NO: 1422 - protein, 29 aa, Artificial Sequence
  Description of Artificial Sequence: Synthetic peptide
DDDKTFYSCLASLLNGNTQPNGGQWVRCR

SEQ ID NO: 1423 - protein, 29 aa, Artificial Sequence
  Description of Artificial Sequence: Synthetic peptide
DDDKSFYSCLASLSNCTPGLLRCQWERCR

SEQ ID NO: 1424 - protein, 29 aa, Artificial Sequence
  Description of Artificial Sequence: Synthetic peptide
DDDKNFYSCLSALLNGNTVSDRGQGERCF

SEQ ID NO: 1425 - protein, 27 aa, Artificial Sequence
  Description of Artificial Sequence: Synthetic peptide
DDTFYSCLASLVNGSPQAYGGPREHCR

SEQ ID NO: 1426 - protein, 29 aa, Artificial Sequence
  Description of Artificial Sequence: Synthetic peptide
DDDKIFYSCLAWLMTGPAPPYRGPWSCWS

SEQ ID NO: 1427 - protein, 29 aa, Artificial Sequence
  Description of Artificial Sequence: Synthetic peptide
DDDKIFYACLSSLSTGTWQPKRGPGERCR

SEQ ID NO: 1428 - protein, 29 aa, Artificial Sequence
  Description of Artificial Sequence: Synthetic peptide
DDDKSFYSCLASLSNCTPGLLRCQWERCR

SEQ ID NO: 1429 - protein, 29 aa, Artificial Sequence
  Description of Artificial Sequence: Synthetic peptide
DDDKTFYSCLGSLINGTPPPHRGLWQGCR

SEQ ID NO: 1430 - protein, 29 aa, Artificial Sequence
  Description of Artificial Sequence: Synthetic peptide
DDDKTFYSCLVSLLNGTAKPNRGQWEGCR

SEQ ID NO: 1431 - protein, 29 aa, Artificial Sequence
  Description of Artificial Sequence: Synthetic peptide
DDDKQFYSCLAFLASGIAQPQPGAWELCR

SEQ ID NO: 1432 - protein, 29 aa, Artificial Sequence
  Description of Artificial Sequence: Synthetic peptide
DDDKTFYCCLAALLTGAPPPKGGTCERCG

SEQ ID NO: 1433 - protein, 43 aa, Artificial Sequence
  Description of Artificial Sequence: Synthetic peptide
FHENFYDWFARKDSGGSGGSGGSDLCVLEELFWGDSLFDYCTG

SEQ ID NO: 1434 - protein, 43 aa, Artificial Sequence
  Description of Artificial Sequence: Synthetic peptide
  MOD_RES (6): Unknown amino acid
FHENFXDWFVRQVSGGSGGSGGSNLCVLEELFWGASLFGECSG

SEQ ID NO: 1435 - protein, 43 aa, Artificial Sequence
  Description of Artificial Sequence: Synthetic peptide
SHGNFSEWFVRQGYGGSGGSGGSDLCVLEELYWGASLFGYCSG

SEQ ID NO: 1436 - protein, 43 aa, Artificial Sequence
  Description of Artificial Sequence: Synthetic peptide
  MOD_RES (12): Unknown amino acid
FQESFYDWFVRXVTGGSGGSGGSDLCGVEDLVWGSALSGYCAG

SEQ ID NO: 1437 - protein, 43 aa, Artificial Sequence
  Description of Artificial Sequence: Synthetic peptide
FHENFNDWFVREVSGGSGGSGGSDLCVLEELFWGASLFSYCSG

SEQ ID NO: 1438 - protein, 43 aa, Artificial Sequence
  Description of Artificial Sequence: Synthetic peptide
  MOD_RES (12): Unknown amino acid
SHENFYDWFVRXGPGGSGGSGGSHLCVLEELFWGDSLFGACPG

SEQ ID NO: 1439 - protein, 43 aa, Artificial Sequence
  Description of Artificial Sequence: Synthetic peptide
  MOD_RES (40): Unknown amino acid
FHENFYDWFARQVSGGSGGSGGSHLCVLEELFWGASLFAXCSD

SEQ ID NO: 1440 - protein, 43 aa, Artificial Sequence
  Description of Artificial Sequence: Synthetic peptide
  MOD_RES (12): Unknown amino acid
FPDNFYDWFVRXVSGGSGGSGGSHLCVLEELFWGASPFGYCSG

SEQ ID NO: 1441 - protein, 43 aa, Artificial Sequence
  Description of Artificial Sequence: Synthetic peptide
FQENFYDWFGRQISGGSGGSGGSPLCDVEELFWGVSLFGYCTG

SEQ ID NO: 1442 - protein, 43 aa, Artificial Sequence
  Description of Artificial Sequence: Synthetic peptide
  MOD_RES (12): Unknown amino acid
FQENFYDWFVRXASGGSGGSGGSHLCALEEQFWGSSQFRYCSG

SEQ ID NO: 1443 - protein, 43 aa, Artificial Sequence
  Description of Artificial Sequence: Synthetic peptide
  MOD_RES (33): Unknown amino acid
FHENFYDWFARQVYGGSGGSGGSHLCVLEELFXGASLFATCSD

SEQ ID NO: 1444 - protein, 43 aa, Artificial Sequence
  Description of Artificial Sequence: Synthetic peptide
  MOD_RES (33): Unknown amino acid
FHENFYDRIVRQVAGGSGGSGGSALCVREELFXGDSLFGDCSG

SEQ ID NO: 1445 - protein, 43 aa, Artificial Sequence
  Description of Artificial Sequence: Synthetic peptide
  MOD_RES (38): Unknown amino acid
FHKNFYDWFDRQVSGGSGGSGSSRLCDLEELFWGASLXGHCSG

SEQ ID NO: 1446 - protein, 43 aa, Artificial Sequence
  Description of Artificial Sequence: Synthetic peptide
FHENFYDWFIRQDSGGSGGSGGSHLCAFEELLGGASPFGYCSG

SEQ ID NO: 1447 - protein, 43 aa, Artificial Sequence
  Description of Artificial Sequence: Synthetic peptide
  MOD_RES (12): Unknown amino acid
SNENFYDWFDRXVSGGSGGSGGSHLCLLEELSWGASLFGYCYG

SEQ ID NO: 1448 - protein, 43 aa, Artificial Sequence
  Description of Artificial Sequence: Synthetic peptide
  MOD_RES (31): Unknown amino acid
FHESFYDWFDRQVSGGSGGSGGSHLCVLEEXELGASVFGCCSG

SEQ ID NO: 1449 - protein, 36 aa, Artificial Sequence
  Description of Artificial Sequence: Synthetic peptide
  MOD_RES (12): Unknown amino acid
FHETFYDWFDRXVSGGSGGSGEELFGGASLFGYPSG

SEQ ID NO: 1450 - protein, 43 aa, Artificial Sequence
  Description of Artificial Sequence: Synthetic peptide
  MOD_RES (33): Unknown amino acid
SHENFYDWFGRQVSGGSGGSGGSNLCDLDEVSXGASLCGYRSG

SEQ ID NO: 1451 - protein, 44 aa, Artificial Sequence
  Description of Artificial Sequence: Synthetic peptide
  MOD_RES (3): Unknown amino acid
  MOD_RES (43): Unknown amino acid
FHXNFYDWFFCQVPEWIPMTLAVLTCAVLEEPIWGDSLFGYGXE

SEQ ID NO: 1452 - protein, 43 aa, Artificial Sequence
  Description of Artificial Sequence: Synthetic peptide
  MOD_RES (14): Unknown amino acid
SHENFYDWFVRQVXGGSGGSGGSHLCDLEELLGGASLMGSCSG

SEQ ID NO: 1453 - protein, 42 aa, Artificial Sequence
  Description of Artificial Sequence: Synthetic peptide
  MOD_RES (12): Unknown amino acid
  MOD_RES (38): Unknown amino acid
SHENFYDWFVRXVSGGAAAGAPPAMASHENFYDWFVRXVSGG

SEQ ID NO: 1454 - protein, 40 aa, Artificial Sequence
  Description of Artificial Sequence: Synthetic peptide
  MOD_RES (12): Unknown amino acid
FHENFYDWFIRXVGGGSGGSGGSDLCVLEDDCSRAAAGAP

SEQ ID NO: 1455 - protein, 25 aa, Artificial Sequence
  Description of Artificial Sequence: Synthetic peptide
  MOD_RES (22): Unknown amino acid
DYKDASVSGTFHDAFYEWFWRXVGS

SEQ ID NO: 1456 - protein, 43 aa, Artificial Sequence
  Description of Artificial Sequence: Synthetic peptide
  MOD_RES (24): Unknown amino acid
  MOD_RES (40): Unknown amino acid
FHENFYDLVPSAGSWWIRWLWRFXPVRLGRTVLGCFSDRXLFW

SEQ ID NO: 1457 - protein, 28 aa, Artificial Sequence
  Description of Artificial Sequence: Synthetic peptide
FHENFYDWFDRQVSGGSGGSVRAAAGAP

SEQ ID NO: 1458 - protein, 43 aa, Artificial Sequence
  Description of Artificial Sequence: Synthetic peptide
  MOD_RES (29): Unknown amino acid
VHENFYDWFDRQVSGGSGGSGGSQLCDLXEVIWGASLFGYCTG

SEQ ID NO: 1459 - protein, 43 aa, Artificial Sequence
  Description of Artificial Sequence: Synthetic peptide
  MOD_RES (12): Unknown amino acid
FHENFYDWFDRXVSGGSGGSGGSHLCVPEEQFWGASRFGYCSA

SEQ ID NO: 1460 - protein, 37 aa, Artificial Sequence
  Description of Artificial Sequence: Synthetic peptide
  MOD_RES (32): Unknown amino acid
FHDNFYDWFVRQVSGGSGGSGGSRQCQGASLXGYCSG

SEQ ID NO: 1461 - protein, 33 aa, Artificial Sequence
  Description of Artificial Sequence: Synthetic peptide
  MOD_RES (12): Unknown amino acid
FHEDFYDWFVRXVPGGSGGSGGSHLCVPGYCSS

SEQ ID NO: 1462 - protein, 36 aa, Artificial Sequence
  Description of Artificial Sequence: Synthetic peptide
  MOD_RES (12): Unknown amino acid
FRENFYDWFVCXVSGGSGGSGGSNLCVLEEAAAGAP

SEQ ID NO: 1463 - protein, 38 aa, Artificial Sequence
  Description of Artificial Sequence: Synthetic peptide
  MOD_RES (28): Unknown amino acid
GHDNFYDWFVRQVSGGSGGSGGSHLCVXGAFPWGYCSD

SEQ ID NO: 1464 - protein, 29 aa, Artificial Sequence
  Description of Artificial Sequence: Synthetic peptide
  MOD_RES (3): Unknown amino acid
FHXNFYDWFVRQVYGGSGGSGTGAAAGAP

SEQ ID NO: 1465 - protein, 43 aa, Artificial Sequence
  Description of Artificial Sequence: Synthetic peptide
  MOD_RES (33): Unknown amino acid
FHENFYDWFGRQVYGGSGGSGGSPVCILGELSXGGALFGDCSG

SEQ ID NO: 1466 - protein, 43 aa, Artificial Sequence
  Description of Artificial Sequence: Synthetic peptide
  MOD_RES (12): Unknown amino acid
FHENFYDWFVRXLSGGSGGSGGSHLCVPEERLWGDPLFGYCSG

SEQ ID NO: 1467 - protein, 27 aa, Artificial Sequence
  Description of Artificial Sequence: Synthetic peptide
  MOD_RES (3): Unknown amino acid
FHXNFYDWFVRQVSGGSGGSGGSHPAR

SEQ ID NO: 1468 - protein, 43 aa, Artificial Sequence
  Description of Artificial Sequence: Synthetic peptide
  MOD_RES (33): Unknown amino acid
FHENFYDWFVRQVTGGSGGSGGSHLCVLEELSXGAALPGYCSG

SEQ ID NO: 1469 - protein, 30 aa, Artificial Sequence
  Description of Artificial Sequence: Synthetic peptide
  MOD_RES (27): Unknown amino acid
VQGSFYDWFVRQVSGGSGGSGGSHLCXGSG

SEQ ID NO: 1470 - protein, 37 aa, Artificial Sequence
  Description of Artificial Sequence: Synthetic peptide
  MOD_RES (33): Unknown amino acid
FHENFYEWFVRQVSGGSGGSGGSHRCDVEELHXCASG

SEQ ID NO: 1471 - protein, 25 aa, Artificial Sequence
  Description of Artificial Sequence: Synthetic peptide
  MOD_RES (17): Unknown amino acid
DYKDGGYWGSFYEGLMXLVQSGTSG

SEQ ID NO: 1472 - protein, 43 aa, Artificial Sequence
  Description of Artificial Sequence: Synthetic peptide
  MOD_RES (40): Unknown amino acid
FHENFYDWFDRQVSGGSGGSGGSHRCVLEERFWGASLFGXCSG

SEQ ID NO: 1473 - protein, 43 aa, Artificial Sequence
  Description of Artificial Sequence: Synthetic peptide
  MOD_RES (33): Unknown amino acid
SHENFYDWFVHQVSGGSGGSGGSHLCVLEERFXGPSLFGYCSG

SEQ ID NO: 1474 - protein, 43 aa, Artificial Sequence
  Description of Artificial Sequence: Synthetic peptide
  MOD_RES (33): Unknown amino acid
FHANFYDWFFRQVSGGSGGSGGSDLCVLQDMFXGGSGAAAGAP

SEQ ID NO: 1475 - protein, 43 aa, Artificial Sequence
  Description of Artificial Sequence: Synthetic peptide
  MOD_RES (33): Unknown amino acid
FQDNFYDWFVRQISGGSGGSGGSHLCVLESWFXGASLFGYCSG

SEQ ID NO: 1476 - protein, 43 aa, Artificial Sequence
  Description of Artificial Sequence: Synthetic peptide
  MOD_RES (8): Unknown amino acid
FHETFYDXLGRLVFGGSGGSGGSHLCVPEELFWGTSLLSYCSG

SEQ ID NO: 1477 - protein, 29 aa, Artificial Sequence
  Description of Artificial Sequence: Synthetic peptide
  MOD_RES (26): Unknown amino acid
FHENFYDWFVRQVSGGSGGSGGSHLXGSG

SEQ ID NO: 1478 - protein, 43 aa, Artificial Sequence
  Description of Artificial Sequence: Synthetic peptide
  MOD_RES (33): Unknown amino acid
FHENFYDWFVRQVSGGSGGSGGSHRCGLEEPVXGASLVGYCAG

SEQ ID NO: 1479 - protein, 24 aa, Artificial Sequence
  Description of Artificial Sequence: Synthetic peptide
  MOD_RES (14): Unknown amino acid
FHANFYDWFVRQVXGGSGGSGGSG

SEQ ID NO: 1480 - protein, 43 aa, Artificial Sequence
  Description of Artificial Sequence: Synthetic peptide
  MOD_RES (33): Unknown amino acid
FHEDFYDWFVRQVGGGSGGSGGSHLCVREELFXGASLLGDCSG

SEQ ID NO: 1481 - protein, 31 aa, Artificial Sequence
  Description of Artificial Sequence: Synthetic peptide
  MOD_RES (1): Unknown amino acid
XHENFYDWFVRQLSGGSGGSDGSHLFGYGSG

SEQ ID NO: 1482 - protein, 43 aa, Artificial Sequence
  Description of Artificial Sequence: Synthetic peptide
FHENFYDWFDRQVGGGSGGSGGFSPVRTGRTVLGGFSVRLLLW

SEQ ID NO: 1483 - protein, 33 aa, Artificial Sequence
  Description of Artificial Sequence: Synthetic peptide
  MOD_RES (12): Unknown amino acid
SHDNFYDWFVRXVSGGSGGSGGSPLCVLGNCSG

SEQ ID NO: 1484 - protein, 43 aa, Artificial Sequence
  Description of Artificial Sequence: Synthetic peptide
  MOD_RES (12): Unknown amino acid
FYDNFYHWFDRXVSGGSGGSGGSHLCVLEERVCGASLFDYRSG

SEQ ID NO: 1485 - protein, 43 aa, Artificial Sequence
  Description of Artificial Sequence: Synthetic peptide
  MOD_RES (33): Unknown amino acid
FSEHFYDWFARQVSGGSGGSGGSHLCVLDERFXGASMVGYCSG

SEQ ID NO: 1486 - protein, 29 aa, Artificial Sequence
  Description of Artificial Sequence: Synthetic peptide
  MOD_RES (26): Unknown amino acid
FPENFYDWFDRQVSGGSGGGASLFGXGSG

SEQ ID NO: 1487 - protein, 43 aa, Artificial Sequence
  Description of Artificial Sequence: Synthetic peptide
FHENFYDWFDRQVSGGSSGSGGSHQCVQEERFWGASLCGYCSG

SEQ ID NO: 1488 - protein, 43 aa, Artificial Sequence
  Description of Artificial Sequence: Synthetic peptide
  MOD_RES (33): Unknown amino acid
FHDSFYDWFVRQVSGGSGGSGGSHLCGLEELFXGASRFGDCSG

SEQ ID NO: 1489 - protein, 35 aa, Artificial Sequence
  Description of Artificial Sequence: Synthetic peptide
  MOD_RES (12): Unknown amino acid
FHGDFYDWFVRXVSGGSGGSGGSHLCVLEELYCSG

SEQ ID NO: 1490 - protein, 43 aa, Artificial Sequence
  Description of Artificial Sequence: Synthetic peptide
  MOD_RES (12): Unknown amino acid
FHDNFYDWFVRXVSGGSGGSGGSHLCVVEERFWGGSPIGYCSG

SEQ ID NO: 1491 - protein, 33 aa, Artificial Sequence
  Description of Artificial Sequence: Synthetic peptide
FQDNFYDWFVRQVSGGSGGSGGSHRCVLEGCSG

SEQ ID NO: 1492 - protein, 26 aa, Artificial Sequence
  Description of Artificial Sequence: Synthetic peptide
FHENFYDWFDRQVSGGSACLFGYCSG

SEQ ID NO: 1493 - protein, 18 aa, Artificial Sequence
  Description of Artificial Sequence: Synthetic peptide
  MOD_RES (12): Unknown amino acid
YHENFYDWFVRXVSGGSG

SEQ ID NO: 1494 - protein, 32 aa, Artificial Sequence
  Description of Artificial Sequence: Synthetic peptide
  MOD_RES (12): Unknown amino acid
VHESFYDWFVRXVAGGSGGSGGSHLCDVDCSG

SEQ ID NO: 1495 - protein, 29 aa, Artificial Sequence
  Description of Artificial Sequence: Synthetic peptide
  MOD_RES (26): Unknown amino acid
FHDNFYDWFDRQVSGGSGGSGSPFGXRSD

SEQ ID NO: 1496 - protein, 43 aa, Artificial Sequence
  Description of Artificial Sequence: Synthetic peptide
  MOD_RES (3): Unknown amino acid
FHXHFYDWFDRQVSGGSGGSGGSLLCVGEEPFWGASLFAYCSG

SEQ ID NO: 1497 - protein, 22 aa, Artificial Sequence
  Description of Artificial Sequence: Synthetic peptide
FHENFYDWFVRQVSGGSGGSGG

SEQ ID NO: 1498 - protein, 43 aa, Artificial Sequence
  Description of Artificial Sequence: Synthetic peptide
  MOD_RES (12): Unknown amino acid
FHESFYDWFVRXVPGGSGGSGGSQLCVQEELFEGDSLLGDCSG

SEQ ID NO: 1499 - protein, 36 aa, Artificial Sequence
  Description of Artificial Sequence: Synthetic peptide
  MOD_RES (26): Unknown amino acid
FHENFYEWFDRQVSGGSGGVLDERFXGACPSGYCSG

SEQ ID NO: 1500 - protein, 43 aa, Artificial Sequence
  Description of Artificial Sequence: Synthetic peptide
  MOD_RES (12): Unknown amino acid
FHDNFYDWFVRXVAGGSGGSGGSHLCVPEELFWGASLFGYCSG

SEQ ID NO: 1501 - protein, 43 aa, Artificial Sequence
  Description of Artificial Sequence: Synthetic peptide
  MOD_RES (12): Unknown amino acid
FGEDFYDWFVRXVSGGSGGSGGSHLCVLDELFWDASPFGFCPG

SEQ ID NO: 1502 - protein, 42 aa, Artificial Sequence
  Description of Artificial Sequence: Synthetic peptide
  MOD_RES (1): Unknown amino acid
XHDNFYGWFDRQVSGGSGGSGGSHLCVLDELLWGASLFGYCS

SEQ ID NO: 1503 - protein, 30 aa, Artificial Sequence
  Description of Artificial Sequence: Synthetic peptide
  MOD_RES (12): Unknown amino acid
FQENFYDWFVRXVSGDELSGGASQCGSCSG

SEQ ID NO: 1504 - protein, 43 aa, Artificial Sequence
  Description of Artificial Sequence: Synthetic peptide
  MOD_RES (40): Unknown amino acid
SHESFYDWFVRQVSGGSGGSGGSDLCVWEELCGGAPLVGXGSS

SEQ ID NO: 1505 - protein, 25 aa, Artificial Sequence
  Description of Artificial Sequence: Synthetic peptide
FPENFYDWFDRQVSGGSGGSGGSSG

SEQ ID NO: 1506 - protein, 43 aa, Artificial Sequence
  Description of Artificial Sequence: Synthetic peptide
FRENFYDWFERQVSGGSGGSGGSHLCVLEELSWGASTFGSCSG

SEQ ID NO: 1507 - protein, 43 aa, Artificial Sequence
  Description of Artificial Sequence: Synthetic peptide
  MOD_RES (12): Unknown amino acid
IHVDFYDWFARXVSGGSGGSGGSSLCVLDELFWDASLFGDCAG

SEQ ID NO: 1508 - protein, 43 aa, Artificial Sequence
  Description of Artificial Sequence: Synthetic peptide
FHASFYDWFDRQVSGGSGGSGGSHLCDLEGLFWGAAPFGYCSG

SEQ ID NO: 1509 - protein, 43 aa, Artificial Sequence
  Description of Artificial Sequence: Synthetic peptide
  MOD_RES (12): Unknown amino acid
SDANFYDWFLRXVSGGSGGSGGSHLCALEEQFWDASLFGDCSG

SEQ ID NO: 1510 - protein, 43 aa, Artificial Sequence
  Description of Artificial Sequence: Synthetic peptide
  MOD_RES (12): Unknown amino acid
FHDKFYDWFVSXVAGGSGGSGGSHLCVLEDRFWGSSLSGYCSG

SEQ ID NO: 1511 - protein, 43 aa, Artificial Sequence
  Description of Artificial Sequence: Synthetic peptide
  MOD_RES (42): Unknown amino acid
FHDNFYDWFVRQVTDGSGGSGGSQLCVVEDLFWDASRFGYCXG

SEQ ID NO: 1512 - protein, 43 aa, Artificial Sequence
  Description of Artificial Sequence: Synthetic peptide
  MOD_RES (12): Unknown amino acid
VSEDFYEWFVRXASGGSGGSGGSNLCVLEELFWGSSLIGDCSG

SEQ ID NO: 1513 - protein, 43 aa, Artificial Sequence
  Description of Artificial Sequence: Synthetic peptide
  MOD_RES (32): Unknown amino acid
FPENFYDWFVRQVSGGSGGSGGSHLCVLEELXWGASMFGYCSG

SEQ ID NO: 1514 - protein, 43 aa, Artificial Sequence
  Description of Artificial Sequence: Synthetic peptide
  MOD_RES (40): Unknown amino acid
FQENFYDWFVRQVSGGSGGSGGSHLCVLEALFWGASLFGXCSG

SEQ ID NO: 1515 - protein, 25 aa, Artificial Sequence
  Description of Artificial Sequence: Synthetic peptide
  MOD_RES (12): Unknown amino acid
  MOD_RES (24): Unknown amino acid
DYKDGRGGRRFXGRSSVVLWKRLXR

SEQ ID NO: 1516 - protein, 26 aa, Artificial Sequence
  Description of Artificial Sequence: Synthetic peptide
  MOD_RES (19): Unknown amino acid
DTKTFIGITGVLPRLSAVXGFWGGSW

SEQ ID NO: 1517 - protein, 43 aa, Artificial Sequence
  Description of Artificial Sequence: Synthetic peptide
  MOD_RES (29): Unknown amino acid
CHENFYVWFVSQVAGGSGGSGGSRLCIMXELFRGASLFGYSSG

SEQ ID NO: 1518 - protein, 43 aa, Artificial Sequence
  Description of Artificial Sequence: Synthetic peptide
  MOD_RES (12): Unknown amino acid
FHANFYDWFVRXVSGGSGGSGGSHLCVLEELVSGPSLLGYCSG

SEQ ID NO: 1519 - protein, 43 aa, Artificial Sequence
  Description of Artificial Sequence: Synthetic peptide
  MOD_RES (12): Unknown amino acid
FHEKFYDWFDLXLSGGSGGSGGSHLCVREEPFWGASLFGYCPG

SEQ ID NO: 1520 - protein, 20 aa, Artificial Sequence
  Description of Artificial Sequence: Synthetic peptide
HLCVLEELFWGASLFGYCSG

SEQ ID NO: 1521 - protein, 20 aa, Artificial Sequence
  Description of Artificial Sequence: Synthetic peptide
WLDQEWAWVQCEVYGRGCPS

SEQ ID NO: 1522 - protein, 33 aa, Artificial Sequence; identical to SEQ ID NO: 1483
  Description of Artificial Sequence: Synthetic peptide
  MOD_RES (12): Unknown amino acid

SEQ ID NO: 1523 - protein, 43 aa, Artificial Sequence; identical to SEQ ID NO: 1484
  Description of Artificial Sequence: Synthetic peptide
  MOD_RES (12): Unknown amino acid

SEQ ID NO: 1524 - protein, 43 aa, Artificial Sequence; identical to SEQ ID NO: 1487
  Description of Artificial Sequence: Synthetic peptide

SEQ ID NO: 1525 - protein, 35 aa, Artificial Sequence; identical to SEQ ID NO: 1489
  Description of Artificial Sequence: Synthetic peptide
  MOD_RES (12): Unknown amino acid

SEQ ID NO: 1526 - protein, 33 aa, Artificial Sequence; identical to SEQ ID NO: 1491
  Description of Artificial Sequence: Synthetic peptide

SEQ ID NO: 1527 - protein, 26 aa, Artificial Sequence
  Description of Artificial Sequence: Synthetic peptide
FHENFYDWFDRQVSGGSACLFGYCSG

SEQ ID NO: 1528 - protein, 32 aa, Artificial Sequence; identical to SEQ ID NO: 1494
  Description of Artificial Sequence: Synthetic peptide
  MOD_RES (12): Unknown amino acid

SEQ ID NO: 1529 - protein, 36 aa, Artificial Sequence; identical to SEQ ID NO: 1499
  Description of Artificial Sequence: Synthetic peptide
  MOD_RES (26): Unknown amino acid

SEQ ID NO: 1530 - protein, 30 aa, Artificial Sequence; identical to SEQ ID NO: 1503
  Description of Artificial Sequence: Synthetic peptide
  MOD_RES (12): Unknown amino acid

SEQ ID NO: 1531 - protein, 43 aa, Artificial Sequence; identical to SEQ ID NO: 1504
  Description of Artificial Sequence: Synthetic peptide
  MOD_RES (40): Unknown amino acid

SEQ ID NO: 1532 - protein, 24 aa, Artificial Sequence
  Description of Artificial Sequence: Synthetic peptide
  MOD_RES (14): Unknown amino acid
FHANFYDWFVRQVXGGSGGSGGSG

SEQ ID NO: 1533 - protein, 18 aa, Artificial Sequence
  Description of Artificial Sequence: Synthetic peptide
  MOD_RES (12): Unknown amino acid
YHENFYDWFVRXVSGGSG

SEQ ID NO: 1534 - protein, 22 aa, Artificial Sequence
  Description of Artificial Sequence: Synthetic peptide
FHENFYDWFVRQVSGGSGGSGG

SEQ ID NO: 1535 - protein, 25 aa, Artificial Sequence
  Description of Artificial Sequence: Synthetic peptide
FPENFYDWFDRQVSGGSGGSGGSSG

SEQ ID NO: 1536 - protein, 29 aa, Artificial Sequence
  Description of Artificial Sequence: Synthetic peptide
  MOD_RES (26): Unknown amino acid
FHENFYDWFVRQVSGGSGGSGGSHLXGSG

SEQ ID NO: 1537 - protein, 31 aa, Artificial Sequence; identical to SEQ ID NO: 1481
  Description of Artificial Sequence: Synthetic peptide
  MOD_RES (1): Unknown amino acid

SEQ ID NO: 1538 - protein, 43 aa, Artificial Sequence; identical to SEQ ID NO: 1482
  Description of Artificial Sequence: Synthetic peptide

SEQ ID NO: 1539 - protein, 29 aa, Artificial Sequence
  Description of Artificial Sequence: Synthetic peptide
  MOD_RES (26): Unknown amino acid
FPENFYDWFDRQVSGGSGGGASLFGXGSG

SEQ ID NO: 1540 - protein, 29 aa, Artificial Sequence
  Description of Artificial Sequence: Synthetic peptide
  MOD_RES (26): Unknown amino acid
FHDNFYDWFDRQVSGGSGGSGSPFGXRSD

SEQ ID NO: 1541 - protein, 23 aa, Artificial Sequence
  Description of Artificial Sequence: Synthetic peptide
DYKDLCQSWGVRIGWLAGLCPKK

SEQ ID NO: 1542 - protein, 17 aa, Artificial Sequence
  Description of Artificial Sequence: Synthetic peptide
LCQSWGVRIGWLAGLCP

SEQ ID NO: 1543 - protein, 8 aa, Artificial Sequence
  Description of Artificial Sequence: Synthetic peptide
  MOD_RES (2): Pro, Gly, Ser, Arg, Ala or Leu; preferably Pro
  MOD_RES (5): Any amino acid; preferably a charged or aromatic amino acid
  MOD_RES (7): Hydrophobic amino acid; preferably Leu or Phe
  MOD_RES (8): Any amino acid; preferably a small amino acid
WXGYXWXX

SEQ ID NO: 1544 - protein, 5 aa, Artificial Sequence
  Description of Artificial Sequence: Synthetic peptide
  MOD_RES (3): Any amino acid
FYXWF

SEQ ID NO: 1545 - protein, 4 aa, Artificial Sequence
  Description of Artificial Sequence: Synthetic peptide
DYKD

SEQ ID NO: 1546 - protein, 6 aa, Artificial Sequence
  Description of Artificial Sequence: Synthetic peptide
AAAGAP

SEQ ID NO: 1547 - protein, 8 aa, Artificial Sequence
  Description of Artificial Sequence: Synthetic peptide
DYKDDDDK

SEQ ID NO: 1548 - protein, 20 aa, Artificial Sequence
  Description of Artificial Sequence: Synthetic peptide
  MOD_RES (14): Tyr or Trp
SLEEEWAQIQCEIXGRGCRY

SEQ ID NO: 1549 - protein, 7 aa, Artificial Sequence
  Description of Artificial Sequence: Synthetic peptide
  MOD_RES (2): Ala or Glu
  MOD_RES (7): Phe or Leu
WXGYEWX

SEQ ID NO: 1550 - protein, 21 aa, Artificial Sequence
  Description of Artificial Sequence: Synthetic peptide
CWARPCGDAANFYDWFVQQAS

SEQ ID NO: 1551 - protein, 12 aa, Artificial Sequence
  Description of Artificial Sequence: Synthetic peptide
SAKNFYDWFVKK

SEQ ID NO: 1552 - protein, 19 aa, Artificial Sequence
  Description of Artificial Sequence: Synthetic peptide
PPWGARFYDAIEQLVFDNL

SEQ ID NO: 1553 - protein, 18 aa, Artificial Sequence
  Description of Artificial Sequence: Synthetic peptide
VMDARDDPFYHKLSELVT

SEQ ID NO: 1554 - protein, 5 aa, Artificial Sequence
  Description of Artificial Sequence: Synthetic peptide
FYDWF

SEQ ID NO: 1555 - protein, 5 aa, Artificial Sequence
  Description of Artificial Sequence: Synthetic peptide
FYEWF

SEQ ID NO: 1556 - protein, 16 aa, Artificial Sequence
  Description of Artificial Sequence: Synthetic peptide
FHENFYDWFVRQVSKK

SEQ ID NO: 1557 - protein, 14 aa, Artificial Sequence
  Description of Artificial Sequence: Synthetic peptide
FHENFYDWFVRQVS

SEQ ID NO: 1558 - protein, 18 aa, Artificial Sequence
  Description of Artificial Sequence: Synthetic peptide
GSLDESFYDWFERQLGKK

SEQ ID NO: 1559 - protein, 16 aa, Artificial Sequence
  Description of Artificial Sequence: Synthetic peptide
GSLDESFYDWFERQLG

SEQ ID NO: 1560 - protein, 21 aa, Artificial Sequence
  Description of Artificial Sequence: Synthetic peptide
GRVDWLQRNANFYDWFVAELG

SEQ ID NO: 1561 - protein, 16 aa, Artificial Sequence
  Description of Artificial Sequence: Synthetic peptide
GLADEDFYEWFERQLR

SEQ ID NO: 1562 - protein, 16 aa, Artificial Sequence
  Description of Artificial Sequence: Synthetic peptide
GLADELFYEWFDRQLS

SEQ ID NO: 1563 - protein, 16 aa, Artificial Sequence
  Description of Artificial Sequence: Synthetic peptide
GQLDEDFYEWFDRQLS

SEQ ID NO: 1564 - protein, 16 aa, Artificial Sequence
  Description of Artificial Sequence: Synthetic peptide
GQLDEDFYAWFDRQLS

SEQ ID NO: 1565 - protein, 16 aa, Artificial Sequence
  Description of Artificial Sequence: Synthetic peptide
GFMDESFYEWFERQLR

SEQ ID NO: 1566 - protein, 16 aa, Artificial Sequence
  Description of Artificial Sequence: Synthetic peptide
GFWDESFYAWFERQLR

SEQ ID NO: 1567 - protein, 16 aa, Artificial Sequence
  Description of Artificial Sequence: Synthetic peptide
GFMDESFYAWFERQLR

SEQ ID NO: 1568 - protein, 16 aa, Artificial Sequence
  Description of Artificial Sequence: Synthetic peptide
GFWDESFYEWFERQLR

SEQ ID NO: 1569 - protein, 8 aa, Artificial Sequence
  Description of Artificial Sequence: Synthetic peptide
  MOD_RES (3)..(4): Any amino acid
  MOD_RES (6)..(7): Any amino acid
FYXXLXXL

SEQ ID NO: 1570 - protein, 8 aa, Artificial Sequence
  Description of Artificial Sequence: Synthetic peptide
  MOD_RES (3)..(4): Any amino acid
  MOD_RES (6)..(7): Any amino acid
FYXXIXXL

SEQ ID NO: 1571 - protein, 8 aa, Artificial Sequence
  Description of Artificial Sequence: Synthetic peptide
  MOD_RES (3): Any amino acid
  MOD_RES (6)..(7): Any amino acid
FYXAIXXL

SEQ ID NO: 1572 - protein, 8 aa, Artificial Sequence
  Description of Artificial Sequence: Synthetic peptide
  MOD_RES (3): Any amino acid
  MOD_RES (6)..(7): Any amino acid
FYXYFXXL

SEQ ID NO: 1573 - protein, 8 aa, Artificial Sequence
  Description of Artificial Sequence: Synthetic peptide
  MOD_RES (3): Any amino acid
  MOD_RES (6)..(7): Any amino acid
FYXYFXXL

SEQ ID NO: 1574 - protein, 16 aa, Artificial Sequence
  Description of Artificial Sequence: Synthetic peptide
  MOD_RES (1)..(4): Any amino acid which allows for binding to IR or IGF-1R
  MOD_RES (7): Any amino acid
  MOD_RES (10)..(11): Any amino acid
  MOD_RES (13)..(16): Any amino acid which allows for binding to IR or IGF-1R
XXXXFYXYFXXLXXXX

SEQ ID NO: 1575 - protein, 20 aa, Artificial Sequence
  Description of Artificial Sequence: Synthetic peptide
  MOD_RES (1): Any amino acid
  MOD_RES (4)..(5): Any amino acid
  MOD_RES (7)..(9): Any amino acid
  MOD_RES (12)..(17): Any amino acid
  MOD_RES (19)..(20): Any amino acid
XLCXXEXXXWGXXXXXXCXX

SEQ ID NO: 1576 - protein, 20 aa, Artificial Sequence
  Description of Artificial Sequence: Synthetic peptide
HLCVLEELFWGASLFGYCSG

SEQ ID NO: 1577 - protein, 20 aa, Artificial Sequence
  Description of Artificial Sequence: Synthetic peptide
  MOD_RES (1)..(4): Any amino acid
  MOD_RES (8): Any hydrophobic amino acid
  MOD_RES (12): Any amino acid
  MOD_RES (13): Any hydrophobic amino acid
  MOD_RES (14)..(15): Any amino acid
  MOD_RES (17): Any amino acid
  MOD_RES (19)..(20): Any amino acid
XXXXLCEXFGGXXXXGXCXX

SEQ ID NO: 1578 - protein, 20 aa, Artificial Sequence
  Description of Artificial Sequence: Synthetic peptide
  MOD_RES (1): Any amino acid
  MOD_RES (3): Any polar amino acid; preferably Asp or Glu
  MOD_RES (4): Any amino acid
  MOD_RES (5): Any amino acid; strong preference for Glu
  MOD_RES (7)..(8): Any amino acid
  MOD_RES (9): Any amino acid; preferaby Val, Ile, Leu or Met
  MOD_RES (10): Any amino acid
  MOD_RES (12): Any amino acid
  MOD_RES (13): Any amino acid; preferably Val, Ile, Leu or Met
  MOD_RES (14): Any aromatic amino acid
  MOD_RES (15)..(17): Any amino acid
  MOD_RES (19)..(20): Any amino acid
XLXXXWXXXXCXXXXXXCXX

SEQ ID NO: 1579 - protein, 23 aa, Artificial Sequence
  Description of Artificial Sequence: Synthetic peptide
KWLDQEWAWVQCEVYGRGCPSKK

SEQ ID NO: 1580 - protein, 21 aa, Artificial Sequence
  Description of Artificial Sequence: Synthetic peptide
KWLDQEWAWVQCEVYGRGCPS

SEQ ID NO: 1581 - protein, 20 aa, Artificial Sequence
  Description of Artificial Sequence: Synthetic peptide
SLEEEWAQIQCEIYGRGCRY

SEQ ID NO: 1582 - protein, 20 aa, Artificial Sequence
  Description of Artificial Sequence: Synthetic peptide
SLEEEWAQIQCEIWGRGCRY

SEQ ID NO: 1583 - protein, 20 aa, Artificial Sequence
  Description of Artificial Sequence: Synthetic peptide
SLEEEWAQIECEVYGRGCPS

SEQ ID NO: 1584 - protein, 20 aa, Artificial Sequence
  Description of Artificial Sequence: Synthetic peptide
SLEEEWAQIECEVWGRGCPS

SEQ ID NO: 1585 - protein, 12 aa, Artificial Sequence
  Description of Artificial Sequence: Synthetic peptide
  MOD_RES (6): Any amino acid; preferably a polar amino acid
  MOD_RES (8)..(10): Any amino acid
HPPLSXLXXXLL

SEQ ID NO: 1586 - protein, 5 aa, Artificial Sequence
  Description of Artificial Sequence: Synthetic peptide
WPTYW

SEQ ID NO: 1587 - protein, 11 aa, Artificial Sequence
  Description of Artificial Sequence: Synthetic peptide
ACVWPTYWNCG

SEQ ID NO: 1588 - protein, 4 aa, Artificial Sequence
  Description of Artificial Sequence: Synthetic peptide
WPGY

SEQ ID NO: 1589 - protein, 23 aa, Artificial Sequence
  Description of Artificial Sequence: Synthetic peptide
KVRGFQGGTVWPGYEWLRNAAKK

SEQ ID NO: 1590 - protein, 21 aa, Artificial Sequence
  Description of Artificial Sequence: Synthetic peptide
KVRGFQGGTVWPGYEWLRNAA

SEQ ID NO: 1591 - protein, 7 aa, Artificial Sequence
  Description of Artificial Sequence: Synthetic peptide
WAGYEWF

SEQ ID NO: 1592 - protein, 7 aa, Artificial Sequence
  Description of Artificial Sequence: Synthetic peptide
WEGYEWL

SEQ ID NO: 1593 - protein, 7 aa, Artificial Sequence
  Description of Artificial Sequence: Synthetic peptide
WAGYEWL

SEQ ID NO: 1594 - protein, 7 aa, Artificial Sequence
  Description of Artificial Sequence: Synthetic peptide
WEGYEWF

SEQ ID NO: 1595 - protein, 15 aa, Artificial Sequence
  Description of Artificial Sequence: Synthetic peptide
DSDWAGYEWFEEQLD

SEQ ID NO: 1596 - protein, 5 aa, Artificial Sequence
  Description of Artificial Sequence: Synthetic peptide
  MOD_RES (3): Any amino acid
FYXWF

SEQ ID NO: 1597 - protein, 4 aa, Artificial Sequence
  Description of Artificial Sequence: Synthetic peptide
VYGR

SEQ ID NO: 1598 - protein, 4 aa, Artificial Sequence
  Description of Artificial Sequence: Synthetic peptide
EQLD

SEQ ID NO: 1599 - protein, 39 aa, Artificial Sequence; identical to SEQ ID NO: 214
  Description of Artificial Sequence: Synthetic peptide

SEQ ID NO: 1600 - protein, 26 aa, Artificial Sequence
  Description of Artificial Sequence: Synthetic peptide
GIISQSCPESFYDWFAGQVSDPWWCW

SEQ ID NO: 1601 - protein, 26 aa, Artificial Sequence
  Description of Artificial Sequence: Synthetic peptide
VGRASGFPENFYDWFGRQLSLQSGEQ

SEQ ID NO: 1602 - protein, 38 aa, Artificial Sequence
  Description of Artificial Sequence: Synthetic peptide
YRGMLVLGRISDGAGVASEPPARIGRKVFAVNFYDWFV

SEQ ID NO: 1603 - protein, 39 aa, Artificial Sequence; identical to SEQ ID NO: 216
  Description of Artificial Sequence: Synthetic peptide

SEQ ID NO: 1604 - protein, 26 aa, Artificial Sequence
  Description of Artificial Sequence: Synthetic peptide
VGYQGQGDENFYDWFIRQVSGRLGVQ

SEQ ID NO: 1605 - protein, 26 aa, Artificial Sequence
  Description of Artificial Sequence: Synthetic peptide
SACQFDCHENFYDWFARQVSGGAAYG

SEQ ID NO: 1606 - protein, 26 aa, Artificial Sequence
  Description of Artificial Sequence: Synthetic peptide
SAAQLFFQESFYDWFLRQVAESSQPN

SEQ ID NO: 1607 - protein, 26 aa, Artificial Sequence
  Description of Artificial Sequence: Synthetic peptide
AVRATRFDEAFYDWFVRQISDGQGNK

SEQ ID NO: 1608 - protein, 26 aa, Artificial Sequence
  Description of Artificial Sequence: Synthetic peptide
VNQSGSIHENFYDWFERQVSHQRGVR

SEQ ID NO: 1609 - protein, 26 aa, Artificial Sequence
  Description of Artificial Sequence: Synthetic peptide
APDPSDFQEIFYDWFVRQVSRMPGGG

SEQ ID NO: 1610 - protein, 25 aa, Artificial Sequence
  Description of Artificial Sequence: Synthetic peptide
SSCDGAGHESFYEWFVRQVSGCRSV

SEQ ID NO: 1611 - protein, 26 aa, Artificial Sequence
  Description of Artificial Sequence: Synthetic peptide
RAGSSDFHEDFYEWFVRQVSLSLKGK

SEQ ID NO: 1612 - protein, 26 aa, Artificial Sequence
  Description of Artificial Sequence: Synthetic peptide
QAVQPGFHEEFYDWFVRQVSTGVGGG

SEQ ID NO: 1613 - protein, 16 aa, Artificial Sequence
  Description of Artificial Sequence: Synthetic peptide
GFREGNFYEWFQAQVT

SEQ ID NO: 1614 - protein, 26 aa, Artificial Sequence
  Description of Artificial Sequence: Synthetic peptide
SSIGGGFHENFYDWFSRQLSQSPPLK

SEQ ID NO: 1615 - protein, 26 aa, Artificial Sequence
  Description of Artificial Sequence: Synthetic peptide
QSPVGSSHEDFYDWFFRQVAQSGAHQ

SEQ ID NO: 1616 - protein, 26 aa, Artificial Sequence
  Description of Artificial Sequence: Synthetic peptide
NYRRQVFNGNFYDWFDRQVFSLVTPG

SEQ ID NO: 1617 - protein, 26 aa, Artificial Sequence
  Description of Artificial Sequence: Synthetic peptide
TLDGGSFEEQFYDWFVRQLSYRTNPD

SEQ ID NO: 1618 - protein, 26 aa, Artificial Sequence
  Description of Artificial Sequence: Synthetic peptide
FYVQQWGHENFYDWFDRQVSQSGGAG

SEQ ID NO: 1619 - protein, 26 aa, Artificial Sequence
  Description of Artificial Sequence: Synthetic peptide
LRRQAPVEENFYDWFVRQVSGDRVGG

SEQ ID NO: 1620 - protein, 26 aa, Artificial Sequence
  Description of Artificial Sequence: Synthetic peptide
RCGRELYHSTFYDWFDRQVAGRTCPS

SEQ ID NO: 1621 - protein, 26 aa, Artificial Sequence
  Description of Artificial Sequence: Synthetic peptide
CCLLCRFQQNFYDWFVCQGISRLRPL

SEQ ID NO: 1622 - protein, 26 aa, Artificial Sequence
  Description of Artificial Sequence: Synthetic peptide
PPLASDLDVQFYGWFVQQVSPPGRGG

SEQ ID NO: 1623 - protein, 25 aa, Artificial Sequence
  Description of Artificial Sequence: Synthetic peptide
GAPVDQLHEDFYDWFVRQVSQAATG

SEQ ID NO: 1624 - protein, 16 aa, Artificial Sequence
  Description of Artificial Sequence: Synthetic peptide
GFREGSFYDWFQAQVT

SEQ ID NO: 1625 - protein, 21 aa, Artificial Sequence
  Description of Artificial Sequence: Synthetic peptide
SQAGSAFYAWFDQVLRTVHSA

SEQ ID NO: 1626 - protein, 26 aa, Artificial Sequence
  Description of Artificial Sequence: Synthetic peptide
RGAVAGFHDQFYDWFDRQVSRVHKFG

SEQ ID NO: 1627 - protein, 26 aa, Artificial Sequence
  Description of Artificial Sequence: Synthetic peptide
AICDAGFHEHFYDWFALQVSDCGRQS

SEQ ID NO: 1628 - protein, 26 aa, Artificial Sequence
  Description of Artificial Sequence: Synthetic peptide
LGYQEPFQQNFYDWFVRQVSGAENAG

SEQ ID NO: 1629 - protein, 21 aa, Artificial Sequence
  Description of Artificial Sequence: Synthetic peptide
EAASLGSQDRNFYDWFVRQVV

SEQ ID NO: 1630 - protein, 21 aa, Artificial Sequence
  Description of Artificial Sequence: Synthetic peptide
VERSASSQDGNFYDWFVVQIR

SEQ ID NO: 1631 - protein, 21 aa, Artificial Sequence
  Description of Artificial Sequence: Synthetic peptide
TSEVQRRSQDNFYDWFVAQVA

SEQ ID NO: 1632 - protein, 26 aa, Artificial Sequence
  Description of Artificial Sequence: Synthetic peptide
HLADGQFHEKFYDWFERQISSRCNDC

SEQ ID NO: 1633 - protein, 26 aa, Artificial Sequence
  Description of Artificial Sequence: Synthetic peptide
FRTLAAQHDSFYDWFDRQVSGAAGER

SEQ ID NO: 1634 - protein, 20 aa, Artificial Sequence
  Description of Artificial Sequence: Synthetic peptide
SFHEDFYDWFDRQVSGSLKK

SEQ ID NO: 1635 - protein, 25 aa, Artificial Sequence
  Description of Artificial Sequence: Synthetic peptide
TFYSCLASLLTGTPQPNRGPWERCR

SEQ ID NO: 1636 - protein, 25 aa, Artificial Sequence
  Description of Artificial Sequence: Synthetic peptide
FFYDCLAALLQGVARYHDLCAVEIT

SEQ ID NO: 1637 - protein, 27 aa, Artificial Sequence
  Description of Artificial Sequence: Synthetic peptide
CCTTEMVVMDARDDPFYHKLSELVTGG

SEQ ID NO: 1638 - protein, 20 aa, Artificial Sequence
  Description of Artificial Sequence: Synthetic peptide
RGQSDAFYSGLWALIGLSDG

SEQ ID NO: 1639 - protein, 21 aa, Artificial Sequence
  Description of Artificial Sequence: Synthetic peptide
GVRAMSFYDALVSVLGLGPSG

SEQ ID NO: 1640 - protein, 20 aa, Artificial Sequence
  Description of Artificial Sequence: Synthetic peptide
RLFYCGIQALGANLGYSGCV

SEQ ID NO: 1641 - protein, 21 aa, Artificial Sequence
  Description of Artificial Sequence: Synthetic peptide
LQPCSGFYECIERLIGVKLSG

SEQ ID NO: 1642 - protein, 17 aa, Artificial Sequence
  Description of Artificial Sequence: Synthetic peptide
LKDGFYDYFWQRLHLGS

SEQ ID NO: 1643 - protein, 21 aa, Artificial Sequence
  Description of Artificial Sequence: Synthetic peptide
VEGRGLFYDLLRQLLARRQNG

SEQ ID NO: 1644 - protein, 27 aa, Artificial Sequence
  Description of Artificial Sequence: Synthetic peptide
RGCNDDGGKGWSDDPFYHKLSELICGG

SEQ ID NO: 1645 - protein, 21 aa, Artificial Sequence
  Description of Artificial Sequence: Synthetic peptide
QGGSASFYDAIDRLLRMRIGG

SEQ ID NO: 1646 - protein, 27 aa, Artificial Sequence
  Description of Artificial Sequence: Synthetic peptide
RCEEKQAEVGPSSDPFYHKMSELLGCR

SEQ ID NO: 1647 - protein, 25 aa, Artificial Sequence
  Description of Artificial Sequence: Synthetic peptide
DRDFCRFYERLTALVGGQVDGGWPC

SEQ ID NO: 1648 - protein, 21 aa, Artificial Sequence
  Description of Artificial Sequence: Synthetic peptide
KLHNLMFYYGLQRLVWGAGLG

SEQ ID NO: 1649 - protein, 21 aa, Artificial Sequence
  Description of Artificial Sequence: Synthetic peptide
GNGDGMFYQLLSLLVGRDMHV

SEQ ID NO: 1650 - protein, 25 aa, Artificial Sequence
  Description of Artificial Sequence: Synthetic peptide
SSYGCDGFYLMLFSLGLVASQELEC

SEQ ID NO: 1651 - protein, 21 aa, Artificial Sequence
  Description of Artificial Sequence: Synthetic peptide
PDLHKGFYAQLAQLIRGQLLS

SEQ ID NO: 1652 - protein, 20 aa, Artificial Sequence
  Description of Artificial Sequence: Synthetic peptide
FYDAIDQLVRGSARAGGTRD

SEQ ID NO: 1653 - protein, 21 aa, Artificial Sequence
  Description of Artificial Sequence: Synthetic peptide
YSCGDGFYSLLSDLLGGQFRC

SEQ ID NO: 1654 - protein, 27 aa, Artificial Sequence
  Description of Artificial Sequence: Synthetic peptide
RGMKEEVLVGGSTDPFYHKLSELLQGS

SEQ ID NO: 1655 - protein, 21 aa, Artificial Sequence
  Description of Artificial Sequence: Synthetic peptide
IQQELTFYDLLHRLVRSELGS

SEQ ID NO: 1656 - protein, 21 aa, Artificial Sequence
  Description of Artificial Sequence: Synthetic peptide
GGTEVDFYRALERLVRGQLGL

SEQ ID NO: 1657 - protein, 20 aa, Artificial Sequence
  Description of Artificial Sequence: Synthetic peptide
LRIANLFYQRLWDLAFGGGG

SEQ ID NO: 1658 - protein, 26 aa, Artificial Sequence
  Description of Artificial Sequence: Synthetic peptide
  MOD_RES (6): Unknown amino acid; translation read-through at TGA stop codon
RCGRWXAEMGAGDDPFYHKLSELVCG

SEQ ID NO: 1659 - protein, 20 aa, Artificial Sequence
  Description of Artificial Sequence: Synthetic peptide
DRAFYNGLRDLVGAVYGAWD

SEQ ID NO: 1660 - protein, 21 aa, Artificial Sequence
  Description of Artificial Sequence: Synthetic peptide
PVGVQGFYEGLSRLVLGRGGW

SEQ ID NO: 1661 - protein, 21 aa, Artificial Sequence
  Description of Artificial Sequence: Synthetic peptide
RFSTDGFYQYLLALVGGGPVG

SEQ ID NO: 1662 - protein, 21 aa, Artificial Sequence
  Description of Artificial Sequence: Synthetic peptide
NSRDGGFYLQLERLLGFPVTG

SEQ ID NO: 1663 - protein, 21 aa, Artificial Sequence
  Description of Artificial Sequence: Synthetic peptide
  MOD_RES (18): Unknown amino acid
VVTPVNFYRALEALVRGXRLG

SEQ ID NO: 1664 - protein, 21 aa, Artificial Sequence
  Description of Artificial Sequence: Synthetic peptide
QPAPDGFYSALMKLIGRGGVS

SEQ ID NO: 1665 - protein, 21 aa, Artificial Sequence
  Description of Artificial Sequence: Synthetic peptide
PGTDLGFYQALRCVVIQGACD

SEQ ID NO: 1666 - protein, 21 aa, Artificial Sequence
  Description of Artificial Sequence: Synthetic peptide
AQPCGGFYGLLEQLVGRSVCD

SEQ ID NO: 1667 - protein, 21 aa, Artificial Sequence
  Description of Artificial Sequence: Synthetic peptide
QPDHSYFYSLLQELVGSEERL

SEQ ID NO: 1668 - protein, 25 aa, Artificial Sequence
  Description of Artificial Sequence: Synthetic peptide
QFYGCLLDLSLGVPSFGWRRRCITA

SEQ ID NO: 1669 - protein, 21 aa, Artificial Sequence
  Description of Artificial Sequence: Synthetic peptide
LGVTDGFYAALGYLIHGVGQF

SEQ ID NO: 1670 - protein, 21 aa, Artificial Sequence
  Description of Artificial Sequence: Synthetic peptide
  MOD_RES (4): Unknown amino acid
CMMXDGFYAGLGCLLTAGEGR

SEQ ID NO: 1671 - protein, 21 aa, Artificial Sequence
  Description of Artificial Sequence: Synthetic peptide
ICTGQGFYQVLCGLLRGTSAR

SEQ ID NO: 1672 - protein, 21 aa, Artificial Sequence
  Description of Artificial Sequence: Synthetic peptide
QGNVLDFYGWIGRLLAKQGSD

SEQ ID NO: 1673 - protein, 21 aa, Artificial Sequence
  Description of Artificial Sequence: Synthetic peptide
VATSQGFYSGLSELLQGGGNV

SEQ ID NO: 1674 - protein, 21 aa, Artificial Sequence
  Description of Artificial Sequence: Synthetic peptide
IWATGDFYRLLSQLVMGRVGT

SEQ ID NO: 1675 - protein, 17 aa, Artificial Sequence
  Description of Artificial Sequence: Synthetic peptide
EGSGFYGYFFSLLGLQG

SEQ ID NO: 1676 - protein, 21 aa, Artificial Sequence
  Description of Artificial Sequence: Synthetic peptide
RQGTGSFYLMLEQLLVGARGP

SEQ ID NO: 1677 - protein, 21 aa, Artificial Sequence
  Description of Artificial Sequence: Synthetic peptide
DSVGDNFYQLLESLVGGHGVG

SEQ ID NO: 1678 - protein, 30 aa, Artificial Sequence
  Description of Artificial Sequence: Synthetic peptide
RGIVAMVEATEVGSDHDPFYHKLSELVQGS

SEQ ID NO: 1679 - protein, 21 aa, Artificial Sequence
  Description of Artificial Sequence: Synthetic peptide
LSSDGQFYRALNLLLQGSAGR

SEQ ID NO: 1680 - protein, 21 aa, Artificial Sequence
  Description of Artificial Sequence: Synthetic peptide
ASSASGFYELLQRLAGLGLEV

SEQ ID NO: 1681 - protein, 25 aa, Artificial Sequence
  Description of Artificial Sequence: Synthetic peptide
FFYRCLSRLLGGQLGSRLGLSCIGD

SEQ ID NO: 1682 - protein, 17 aa, Artificial Sequence
  Description of Artificial Sequence: Synthetic peptide
IIGGFYSYFNSVLRLGT

SEQ ID NO: 1683 - protein, 21 aa, Artificial Sequence
  Description of Artificial Sequence: Synthetic peptide
PAGPCGFYCGLGLLLHGDQSP

SEQ ID NO: 1684 - protein, 21 aa, Artificial Sequence
  Description of Artificial Sequence: Synthetic peptide
RCQGTGFYTCIQELIGFGDPD

SEQ ID NO: 1685 - protein, 27 aa, Artificial Sequence
  Description of Artificial Sequence: Synthetic peptide
SGAKVIVVTGDSGDPFYHKLSELLQGS

SEQ ID NO: 1686 - protein, 21 aa, Artificial Sequence
  Description of Artificial Sequence: Synthetic peptide
VGTVAGFYDAIAQLVARASRV

SEQ ID NO: 1687 - protein, 21 aa, Artificial Sequence
  Description of Artificial Sequence: Synthetic peptide
TLRSPTFYDWLEMVLTHGQGG

SEQ ID NO: 1688 - protein, 17 aa, Artificial Sequence
  Description of Artificial Sequence: Synthetic peptide
RFDPFYSYFVNLLGASA

SEQ ID NO: 1689 - protein, 27 aa, Artificial Sequence
  Description of Artificial Sequence: Synthetic peptide
RGKTAAVIVGRPADPFYHKLSELLQGG

SEQ ID NO: 1690 - protein, 27 aa, Artificial Sequence
  Description of Artificial Sequence: Synthetic peptide
GCVVEWQKWHGASDPFYHKLSELGGCS

SEQ ID NO: 1691 - protein, 27 aa, Artificial Sequence
  Description of Artificial Sequence: Synthetic peptide
GRTMAVMAAGGPDDPFYHKLSELVQGG

SEQ ID NO: 1692 - protein, 27 aa, Artificial Sequence
  Description of Artificial Sequence: Synthetic peptide
GCAVVEEAERSRGDPFYHKLSELIQGC

SEQ ID NO: 1693 - protein, 26 aa, Artificial Sequence
  Description of Artificial Sequence: Synthetic peptide
GCEVIVEEGDSADPFYHKLSELCQGS

SEQ ID NO: 1694 - protein, 21 aa, Artificial Sequence
  Description of Artificial Sequence: Synthetic peptide
MMVVDGFYDALHQLVVAQSLG

SEQ ID NO: 1695 - protein, 21 aa, Artificial Sequence
  Description of Artificial Sequence: Synthetic peptide
LSVALSFYDALGQLVAGEGRW

SEQ ID NO: 1696 - protein, 27 aa, Artificial Sequence
  Description of Artificial Sequence: Synthetic peptide
GGTKAVAKVGTRDDPFYHKLSELLQGS

SEQ ID NO: 1697 - protein, 40 aa, Artificial Sequence
  Description of Artificial Sequence: Synthetic peptide
AETSVQVGWIRLQSVWPGEHWNTVDPFYHKLSELLRGSGA

SEQ ID NO: 1698 - protein, 27 aa, Artificial Sequence
  Description of Artificial Sequence: Synthetic peptide
SRAKVEAEMPDSGDPFYHKLSELLASG

SEQ ID NO: 1699 - protein, 27 aa, Artificial Sequence
  Description of Artificial Sequence: Synthetic peptide
SRVAATKEKRPSDDPFYHKLSELLQGS

SEQ ID NO: 1700 - protein, 27 aa, Artificial Sequence
  Description of Artificial Sequence: Synthetic peptide
SSETAKMVTGTRDDPFYHKLSELVQGS

SEQ ID NO: 1701 - protein, 24 aa, Artificial Sequence
  Description of Artificial Sequence: Synthetic peptide
GCITAENGAGDPFYHKLSELGGCS

SEQ ID NO: 1702 - protein, 28 aa, Artificial Sequence
  Description of Artificial Sequence: Synthetic peptide
RCGDEEGWQENRRDDPFYHKLSELFGGC

SEQ ID NO: 1703 - protein, 21 aa, Artificial Sequence
  Description of Artificial Sequence: Synthetic peptide
MNVFVSFYDAIDQLVCQRIGC

SEQ ID NO: 1704 - protein, 21 aa, Artificial Sequence
  Description of Artificial Sequence: Synthetic peptide
QSGSGDFYDWLSRLIRGNGDG

SEQ ID NO: 1705 - protein, 24 aa, Artificial Sequence
  Description of Artificial Sequence: Synthetic peptide
CGAKMTGTPNDPFYHKLSELLQRG

SEQ ID NO: 1706 - protein, 21 aa, Artificial Sequence
  Description of Artificial Sequence: Synthetic peptide
GHYFGSFYDAIDQLVAGMLPG

SEQ ID NO: 1707 - protein, 40 aa, Artificial Sequence
  Description of Artificial Sequence: Synthetic peptide
  MOD_RES (9): Unknown amino acid; translation read-through at TGA stop codon
AGTPAQVGXNRLWSVWPGEHWNTVDPFYNKLSELLRESGA

SEQ ID NO: 1708 - protein, 27 aa, Artificial Sequence
  Description of Artificial Sequence: Synthetic peptide
CSMAAVAEAGDDDDPFYHKLSELCQGS

SEQ ID NO: 1709 - protein, 40 aa, Artificial Sequence
  Description of Artificial Sequence: Synthetic peptide
  MOD_RES (30): Unknown amino acid; translation read-through at TGA stop codon
VDTPAQVGWNRLWSVGPGEHWYTDDPFYHXLSELLRESGA

SEQ ID NO: 1710 - protein, 40 aa, Artificial Sequence
  Description of Artificial Sequence: Synthetic peptide
AETSAQVGWQRLWSVWPGDHWSTLDPFYHKLSELLRESGA

SEQ ID NO: 1711 - protein, 21 aa, Artificial Sequence
  Description of Artificial Sequence: Synthetic peptide
AGSVTSFYDAMEQLVATGTSA

SEQ ID NO: 1712 - protein, 18 aa, Artificial Sequence
  Description of Artificial Sequence: Synthetic peptide
TDDGFYDALEQLVQGSKK

SEQ ID NO: 1713 - protein, 18 aa, Artificial Sequence
  Description of Artificial Sequence: Synthetic peptide
GSFYEALQRLVGGEQGKK

SEQ ID NO: 1714 - protein, 20 aa, Artificial Sequence
  Description of Artificial Sequence: Synthetic peptide
VRGFQGGTVWPGYEWLRNAA

SEQ ID NO: 1715 - protein, 40 aa, Artificial Sequence; identical to SEQ ID NO: 1109
  Description of Artificial Sequence: Synthetic peptide

SEQ ID NO: 1716 - protein, 39 aa, Artificial Sequence
  Description of Artificial Sequence: Synthetic peptide
GLDHSDAVGVHLGFAWPAQARGRWEAGGLEDTWAGYDWL

SEQ ID NO: 1717 - protein, 8 aa, Artificial Sequence
  Description of Artificial Sequence: Synthetic peptide
  MOD_RES (2): Unknown amino acid
WXGYAWLS

SEQ ID NO: 1718 - protein, 23 aa, Artificial Sequence
  Description of Artificial Sequence: Synthetic peptide
KRGGGTFYEWFESALRKHGAGKK

SEQ ID NO: 1719 - protein, 23 aa, Artificial Sequence
  Description of Artificial Sequence: Synthetic peptide
VTFTSAVFHENFYDWFVRQVSKK

SEQ ID NO: 1720 - protein, 21 aa, Artificial Sequence
  Description of Artificial Sequence: Synthetic peptide
NGVERAGTGDNFYDWFVAQLH

SEQ ID NO: 1721 - protein, 21 aa, Artificial Sequence
  Description of Artificial Sequence: Synthetic peptide
QSDSGTVHDRFYGWFRDTWAS

SEQ ID NO: 1722 - protein, 21 aa, Artificial Sequence
  Description of Artificial Sequence: Synthetic peptide
GRFYGWFQDAIDQLMPWGFDP

SEQ ID NO: 1723 - protein, 17 aa, Artificial Sequence
  Description of Artificial Sequence: Synthetic peptide
RYGRWGLAQQFYDWFDR

SEQ ID NO: 1724 - protein, 16 aa, Artificial Sequence
  Description of Artificial Sequence: Synthetic peptide
GFREGQRWYWFVAQVT

SEQ ID NO: 1725 - protein, 26 aa, Artificial Sequence
  Description of Artificial Sequence: Synthetic peptide
TYKARFLHENFYDWFNRQVSQYFGRV

SEQ ID NO: 1726 - protein, 21 aa, Artificial Sequence
  Description of Artificial Sequence: Synthetic peptide
WTDVDGFHSGFYRWFQNQWER

SEQ ID NO: 1727 - protein, 21 aa, Artificial Sequence
  Description of Artificial Sequence: Synthetic peptide
VASGHVLHGQFYRWFVDQFAL

SEQ ID NO: 1728 - protein, 21 aa, Artificial Sequence
  Description of Artificial Sequence: Synthetic peptide
QARVGNVHQQFYEWFREVMQG

SEQ ID NO: 1729 - protein, 21 aa, Artificial Sequence
  Description of Artificial Sequence: Synthetic peptide
TGHRLGLDEQFYWWFRDALSG

SEQ ID NO: 1730 - protein, 21 aa, Artificial Sequence
  Description of Artificial Sequence: Synthetic peptide
VGDFCVSHDCFYGWFLRESMQ

SEQ ID NO: 1731 - protein, 21 aa, Artificial Sequence
  Description of Artificial Sequence: Synthetic peptide
RMYFSTGAPQNFYDWFVQEWD

SEQ ID NO: 1732 - protein, 8 aa, Artificial Sequence
  Description of Artificial Sequence: Synthetic peptide
  MOD_RES (3)..(4): Unknown amino acid
  MOD_RES (6)..(7): Unknown amino acid
FYXXLXXL

SEQ ID NO: 1733 - protein, 23 aa, Artificial Sequence
  Description of Artificial Sequence: Synthetic peptide
KDRAFYNGLRDLVGAVYGAWDKK

SEQ ID NO: 1734 - protein, 26 aa, Artificial Sequence
  Description of Artificial Sequence: Synthetic peptide
DYKDFYDAIDQLVRGSARAGGTRDKK

SEQ ID NO: 1735 - protein, 21 aa, Artificial Sequence
  Description of Artificial Sequence: Synthetic peptide
EHWNTVDPFYFTLFEWLRESG

SEQ ID NO: 1736 - protein, 21 aa, Artificial Sequence
  Description of Artificial Sequence: Synthetic peptide
EHWNTVDPFYQYFSELLRESG

SEQ ID NO: 1737 - protein, 21 aa, Artificial Sequence
  Description of Artificial Sequence: Synthetic peptide
AGVNAGFYRYFSTLLDWWDQG

SEQ ID NO: 1738 - protein, 21 aa, Artificial Sequence
  Description of Artificial Sequence: Synthetic peptide
IQGWEPFYGWFDDVVAQMFEE

SEQ ID NO: 1739 - protein, 21 aa, Artificial Sequence
  Description of Artificial Sequence: Synthetic peptide
PPWGARFYDAIEQLVFDNLCC

SEQ ID NO: 1740 - protein, 17 aa, Artificial Sequence
  Description of Artificial Sequence: Synthetic peptide
RWPNFYGYFESLLTHFS

SEQ ID NO: 1741 - protein, 17 aa, Artificial Sequence
  Description of Artificial Sequence: Synthetic peptide
HYNAFYEYFQVLLAETW

SEQ ID NO: 1742 - protein, 21 aa, Artificial Sequence
  Description of Artificial Sequence: Synthetic peptide
IGRVRSFYDAIDKLFQSDWER

SEQ ID NO: 1743 - protein, 17 aa, Artificial Sequence
  Description of Artificial Sequence: Synthetic peptide
EGWDFYSYFSGLLASVT

SEQ ID NO: 1744 - protein, 21 aa, Artificial Sequence
  Description of Artificial Sequence: Synthetic peptide
SVKEVQFYRYFYDLLQSEESG

SEQ ID NO: 1745 - protein, 21 aa, Artificial Sequence
  Description of Artificial Sequence: Synthetic peptide
GNSGGSFYRYFQLLLDSDGMS

SEQ ID NO: 1746 - protein, 21 aa, Artificial Sequence
  Description of Artificial Sequence: Synthetic peptide
RDAGSSFYDAIDQLVCLTYFC

SEQ ID NO: 1747 - protein, 8 aa, Artificial Sequence
  Description of Artificial Sequence: Synthetic peptide
  MOD_RES (2)..(3): Unknown amino acid
  MOD_RES (5)..(6): Unknown amino acid
LXXLXXYF

SEQ ID NO: 1748 - protein, 17 aa, Artificial Sequence
  Description of Artificial Sequence: Synthetic peptide
LDALDRLMRYFEERPSL

SEQ ID NO: 1749 - protein, 20 aa, Artificial Sequence
  Description of Artificial Sequence: Synthetic peptide
PLAELWAYFEHSEQGRSSAH

SEQ ID NO: 1750 - protein, 17 aa, Artificial Sequence
  Description of Artificial Sequence: Synthetic peptide
LDPLDALLQYFWSVPGH

SEQ ID NO: 1751 - protein, 17 aa, Artificial Sequence
  Description of Artificial Sequence: Synthetic peptide
RGRLGSLSTQFYNWFAE

SEQ ID NO: 1752 - protein, 17 aa, Artificial Sequence
  Description of Artificial Sequence: Synthetic peptide
ADELEWLLDYFMHQPRP

SEQ ID NO: 1753 - protein, 17 aa, Artificial Sequence
  Description of Artificial Sequence: Synthetic peptide
DGVLEELFSYFSATVGP

SEQ ID NO: 1754 - protein, 7 aa, Artificial Sequence
  Description of Artificial Sequence: Synthetic peptide
  MOD_RES (3): Unknown amino acid
  MOD_RES (5): Unknown amino acid
WPXYXWL

SEQ ID NO: 1755 - protein, 20 aa, Artificial Sequence
  Description of Artificial Sequence: Synthetic peptide
WPGYLFFEEALQDWRGSTED

SEQ ID NO: 1756 - protein, 17 aa, Artificial Sequence
  Description of Artificial Sequence: Synthetic peptide
AAVHEQFYDWFADQYKK

SEQ ID NO: 1757 - protein, 17 aa, Artificial Sequence
  Description of Artificial Sequence: Synthetic peptide
QAPSNFYDWFVREWDKK

SEQ ID NO: 1758 - protein, 17 aa, Artificial Sequence
  Description of Artificial Sequence: Synthetic peptide
QSFYDYIEELLGGEWKK

SEQ ID NO: 1759 - protein, 17 aa, Artificial Sequence
  Description of Artificial Sequence: Synthetic peptide
DPFYQGLWEWLRESGKK

SEQ ID NO: 1760 - protein, 20 aa, Artificial Sequence
  Description of Artificial Sequence: Synthetic peptide
HLCVLEELFWGASLFGYCSG

SEQ ID NO: 1761 - protein, 20 aa, Artificial Sequence
  Description of Artificial Sequence: Synthetic peptide
FQSLLEELVWGAPLFRYGTG

SEQ ID NO: 1762 - protein, 20 aa, Artificial Sequence
  Description of Artificial Sequence: Synthetic peptide
PLCVLEELFWGASLFGYCSG

SEQ ID NO: 1763 - protein, 20 aa, Artificial Sequence
  Description of Artificial Sequence: Synthetic peptide
PLCVLEELFWGASLFGQCSG

SEQ ID NO: 1764 - protein, 20 aa, Artificial Sequence
  Description of Artificial Sequence: Synthetic peptide
HLCVLEELFWGASLFGQCSG

SEQ ID NO: 1765 - protein, 20 aa, Artificial Sequence
  Description of Artificial Sequence: Synthetic peptide
DLRVLCELFGGAYVLGYCSE

SEQ ID NO: 1766 - protein, 20 aa, Artificial Sequence
  Description of Artificial Sequence: Synthetic peptide
HRSVLKQLSWGASLFGQWAG

SEQ ID NO: 1767 - protein, 20 aa, Artificial Sequence
  Description of Artificial Sequence: Synthetic peptide
HLSVGEELSWWVALLGQWAR

SEQ ID NO: 1768 - protein, 20 aa, Artificial Sequence
  Description of Artificial Sequence: Synthetic peptide
APVSTEELRWGALLFGQWAG

SEQ ID NO: 1769 - protein, 23 aa, Artificial Sequence
  Description of Artificial Sequence: Synthetic peptide
KWLDQEWAWVQCEVYGRGCPSKK

SEQ ID NO: 1770 - protein, 20 aa, Artificial Sequence
  Description of Artificial Sequence: Synthetic peptide
QLEEEWAGVQCEVYGRECPS

SEQ ID NO: 1771 - protein, 20 aa, Artificial Sequence
  Description of Artificial Sequence: Synthetic peptide
ALEEEWAWVQVRSIRSGLPL

SEQ ID NO: 1772 - protein, 20 aa, Artificial Sequence
  Description of Artificial Sequence: Synthetic peptide
SLDQEWAWVQCEVYGRGCLS

SEQ ID NO: 1773 - protein, 20 aa, Artificial Sequence
  Description of Artificial Sequence: Synthetic peptide
WLEHEWAQIQCELYGRGCTY

SEQ ID NO: 1774 - protein, 20 aa, Artificial Sequence
  Description of Artificial Sequence: Synthetic peptide
GLEQGCPWVGLEVQCRGCPS

SEQ ID NO: 1775 - protein, 20 aa, Artificial Sequence
  Description of Artificial Sequence: Synthetic peptide
DLRVLCELFGGAYVLGYCSE

SEQ ID NO: 1776 - protein, 20 aa, Artificial Sequence
  Description of Artificial Sequence: Synthetic peptide
PLWGLCELFGGASLFGYCSS

SEQ ID NO: 1777 - protein, 12 aa, Artificial Sequence
  Description of Artificial Sequence: Synthetic peptide
GGSGGSGGSGGS

SEQ ID NO: 1778 - protein, 6 aa, Artificial Sequence
  Description of Artificial Sequence: Synthetic peptide
HHHHHH

SEQ ID NO: 1779 - protein, 8 aa, Artificial Sequence
  Description of Artificial Sequence: Synthetic peptide
DYKDDDDK

SEQ ID NO: 1780 - protein, 15 aa, Artificial Sequence
  Description of Artificial Sequence: Synthetic peptide
FHENFYDWFVRQVSK

SEQ ID NO: 1781 - protein, 24 aa, Artificial Sequence
  Description of Artificial Sequence: Synthetic peptide
DYKDFYDAIQLVRSARAGGTRDKK

SEQ ID NO: 1782 - protein, 18 aa, Artificial Sequence
  Description of Artificial Sequence: Synthetic peptide
FYDAIQLVRSARAGGTRD

SEQ ID NO: 1783 - protein, 27 aa, Artificial Sequence
  Description of Artificial Sequence: Synthetic peptide
DYKDVTFTSAVFHENFYDWFVRQVSKK

SEQ ID NO: 1784 - protein, 21 aa, Artificial Sequence
  Description of Artificial Sequence: Synthetic peptide
VTFTSAVFHENFYDWFVRQVS

SEQ ID NO: 1785 - protein, 4 aa, Artificial Sequence
  Description of Artificial Sequence: Synthetic peptide
GSLD

SEQ ID NO: 1786 - protein, 4 aa, Artificial Sequence
  Description of Artificial Sequence: Synthetic peptide
LGKK

SEQ ID NO: 1787 - protein, 15 aa, Artificial Sequence
  Description of Artificial Sequence: Synthetic peptide
GSLDESFYDWFERQL

SEQ ID NO: 1788 - protein, 14 aa, Artificial Sequence
  Description of Artificial Sequence: Synthetic peptide
GSLDESFYDWFERQ

SEQ ID NO: 1789 - protein, 13 aa, Artificial Sequence
  Description of Artificial Sequence: Synthetic peptide
GSLDESFYDWFER

SEQ ID NO: 1790 - protein, 11 aa, Artificial Sequence
  Description of Artificial Sequence: Synthetic peptide
ESFYDWFERQL

SEQ ID NO: 1791 - protein, 10 aa, Artificial Sequence
  Description of Artificial Sequence: Synthetic peptide
ESFYDWFERQ

SEQ ID NO: 1792 - protein, 38 aa, Artificial Sequence
  Description of Artificial Sequence: Synthetic peptide
  MOD_RES (19): Lig
  MOD_RES (38): Lig
GSLDESFYDWFERQLGKKXGSLDESFYDWFERQLGKKX

SEQ ID NO: 1793 - protein, 36 aa, Artificial Sequence
  Description of Artificial Sequence: Synthetic peptide
GSLDESFYDWFERQLGKKGSLDESFYDWFERQLGKK

SEQ ID NO: 1794 - protein, 12 aa, Artificial Sequence
  Description of Artificial Sequence: Synthetic peptide
ESFYDWFERQLG

SEQ ID NO: 1795 - protein, 26 aa, Artificial Sequence
  Description of Artificial Sequence: Synthetic peptide
ESFYDWFERQLGKESFYDWFERQLGK

SEQ ID NO: 1796 - protein, 24 aa, Artificial Sequence
  Description of Artificial Sequence: Synthetic peptide
ESFYDWFERQLGESFYDWFERQLG

SEQ ID NO: 1797 - protein, 16 aa, Artificial Sequence
  Description of Artificial Sequence: Synthetic peptide
FHENFYDWFVRQVAKK

SEQ ID NO: 1798 - protein, 16 aa, Artificial Sequence
  Description of Artificial Sequence: Synthetic peptide
FHENFYDWFVRQASKK

SEQ ID NO: 1799 - protein, 16 aa, Artificial Sequence
  Description of Artificial Sequence: Synthetic peptide
FHENFYDWFVRAVSKK

SEQ ID NO: 1800 - protein, 16 aa, Artificial Sequence
  Description of Artificial Sequence: Synthetic peptide
FHENFYDWFVAQVSKK

SEQ ID NO: 1801 - protein, 16 aa, Artificial Sequence
  Description of Artificial Sequence: Synthetic peptide
FHENFYDWFARQVSKK

SEQ ID NO: 1802 - protein, 16 aa, Artificial Sequence
  Description of Artificial Sequence: Synthetic peptide
FHEAFYDWFVRQVSKK

SEQ ID NO: 1803 - protein, 16 aa, Artificial Sequence
  Description of Artificial Sequence: Synthetic peptide
FHANFYDWFVRQVSKK

SEQ ID NO: 1804 - protein, 16 aa, Artificial Sequence
  Description of Artificial Sequence: Synthetic peptide
FAENFYDWFVRQVSKK

SEQ ID NO: 1805 - protein, 16 aa, Artificial Sequence
  Description of Artificial Sequence: Synthetic peptide
AHENFYDWFVRQVSKK

SEQ ID NO: 1806 - protein, 17 aa, Artificial Sequence
  Description of Artificial Sequence: Synthetic peptide
EFHENFYDWFVRQVSEE

SEQ ID NO: 1807 - protein, 16 aa, Artificial Sequence
  Description of Artificial Sequence: Synthetic peptide
FHENFYGWFVRQVSKK

SEQ ID NO: 1808 - protein, 13 aa, Artificial Sequence
  Description of Artificial Sequence: Synthetic peptide
HETFYSMIRSLAK

SEQ ID NO: 1809 - protein, 12 aa, Artificial Sequence
  Description of Artificial Sequence: Synthetic peptide
SDGFYNAIELLS

SEQ ID NO: 1810 - protein, 14 aa, Artificial Sequence
  Description of Artificial Sequence: Synthetic peptide
SLNFYDALQLLAKK

SEQ ID NO: 1811 - protein, 13 aa, Artificial Sequence
  Description of Artificial Sequence: Synthetic peptide
HDPFYSMMKSLLK

SEQ ID NO: 1812 - protein, 13 aa, Artificial Sequence
  Description of Artificial Sequence: Synthetic peptide
NSFYEALRMLSSK

SEQ ID NO: 1813 - protein, 13 aa, Artificial Sequence
  Description of Artificial Sequence: Synthetic peptide
HPTSKEIYAKLLK

SEQ ID NO: 1814 - protein, 13 aa, Artificial Sequence
  Description of Artificial Sequence: Synthetic peptide
HPSTNQMLMKLFK

SEQ ID NO: 1815 - protein, 14 aa, Artificial Sequence
  Description of Artificial Sequence: Synthetic peptide
HPPLSELKLFLIKK

SEQ ID NO: 1816 - protein, 12 aa, Artificial Sequence
  Description of Artificial Sequence: Synthetic peptide
WSDFYSYFQGLD

SEQ ID NO: 1817 - protein, 16 aa, Artificial Sequence
  Description of Artificial Sequence: Synthetic peptide
  SITE (16): This residue is chemically linked to the C-terminus of SEQ ID NO: 1818
FHENFYDWFVRQVSKK

SEQ ID NO: 1818 - protein, 17 aa, Artificial Sequence
  Description of Artificial Sequence: Synthetic peptide
  MOD_RES (1): Dap
XFHENFYDWFVRQVSKK

SEQ ID NO: 1819 - protein, 12 aa, Artificial Sequence
  Description of Artificial Sequence: Synthetic peptide
SSNFYQALMLLS

SEQ ID NO: 1820 - protein, 17 aa, Artificial Sequence
  Description of Artificial Sequence: Synthetic peptide
  MOD_RES (17): Lig
FHENFYDWFVRQVSKKX

SEQ ID NO: 1821 - protein, 15 aa, Artificial Sequence
  Description of Artificial Sequence: Synthetic peptide
HENFYGWFVRQVSKK

SEQ ID NO: 1822 - protein, 16 aa, Artificial Sequence
  Description of Artificial Sequence: Synthetic peptide
  SITE (16): This residue is chemically linked to the C-terminus of SEQ ID NO: 1823
FHENFYDWFVRQVSKK

SEQ ID NO: 1823 - protein, 17 aa, Artificial Sequence
  Description of Artificial Sequence: Synthetic peptide
KFHENFYDWFVRQVSKK

SEQ ID NO: 1824 - protein, 7 aa, Artificial Sequence
  Description of Artificial Sequence: Synthetic peptide
FYDWFKK

SEQ ID NO: 1825 - protein, 9 aa, Artificial Sequence
  Description of Artificial Sequence: Synthetic peptide
AFYDWFAKK

SEQ ID NO: 1826 - protein, 16 aa, Artificial Sequence
  Description of Artificial Sequence: Synthetic peptide
AAAAFYDWFAAAAAKK

SEQ ID NO: 1827 - protein, 17 aa, Artificial Sequence
  Description of Artificial Sequence: Synthetic peptide
  MOD_RES (1): Lig
  SITE (1): This residue is chemically linked to the N-terminus of SEQ ID NO: 1828
XFHENFYDWFVRQVSKK

SEQ ID NO: 1828 - protein, 17 aa, Artificial Sequence
  Description of Artificial Sequence: Synthetic peptide
  MOD_RES (1): Lig
XFHENFYDWFVRQVSKK

SEQ ID NO: 1829 - protein, 18 aa, Artificial Sequence
  Description of Artificial Sequence: Synthetic peptide
  SITE (1): This residue is chemically linked to the N-terminus of SEQ ID NO: 1830
CGFHENFYDWFVRQVSKK

SEQ ID NO: 1830 - protein, 18 aa, Artificial Sequence
  Description of Artificial Sequence: Synthetic peptide
CGFHENFYDWFVRQVSKK

SEQ ID NO: 1831 - protein, 18 aa, Artificial Sequence
  Description of Artificial Sequence: Synthetic peptide
CGFHENFYDWFVRQVSKK

SEQ ID NO: 1832 - protein, 17 aa, Artificial Sequence
  Description of Artificial Sequence: Synthetic peptide
  MOD_RES (1): Lig
  SITE (1): This residue is chemically linked to the N-terminus of SEQ ID NO: 1833
XFHENFYDWFVRQVSKK

SEQ ID NO: 1833 - protein, 17 aa, Artificial Sequence
  Description of Artificial Sequence: Synthetic peptide
  MOD_RES (1): Lig
XFHENFYDWFVRQVSKK

SEQ ID NO: 1834 - protein, 17 aa, Artificial Sequence
  Description of Artificial Sequence: Synthetic peptide
LDALDRLMRYFEERPSL

SEQ ID NO: 1835 - protein, 20 aa, Artificial Sequence
  Description of Artificial Sequence: Synthetic peptide
PLAELWAYFEHSEQGRSSAH

SEQ ID NO: 1836 - protein, 21 aa, Artificial Sequence
  Description of Artificial Sequence: Synthetic peptide
NGVERAGTGDNFYDWFVAQLH

SEQ ID NO: 1837 - protein, 21 aa, Artificial Sequence
  Description of Artificial Sequence: Synthetic peptide
EHWNTVDPFYFTLFEWLRESG

SEQ ID NO: 1838 - protein, 21 aa, Artificial Sequence
  Description of Artificial Sequence: Synthetic peptide
EHWNTVDPFYQYFSELLRESG

SEQ ID NO: 1839 - protein, 21 aa, Artificial Sequence
  Description of Artificial Sequence: Synthetic peptide
QSDSGTVHDRFYGWFRDTWAS

SEQ ID NO: 1840 - protein, 8 aa, Artificial Sequence
  Description of Artificial Sequence: Synthetic peptide
AFYDWFAK

SEQ ID NO: 1841 - protein, 7 aa, Artificial Sequence
  Description of Artificial Sequence: Synthetic peptide
AFYDWFA

SEQ ID NO: 1842 - protein, 6 aa, Artificial Sequence
  Description of Artificial Sequence: Synthetic peptide
AFYDWF

SEQ ID NO: 1843 - protein, 6 aa, Artificial Sequence
  Description of Artificial Sequence: Synthetic peptide
FYDWFA

SEQ ID NO: 1844 - protein, 5 aa, Artificial Sequence
  Description of Artificial Sequence: Synthetic peptide
FYDWF

SEQ ID NO: 1845 - protein, 9 aa, Artificial Sequence
  Description of Artificial Sequence: Synthetic peptide
AFYEWFAKK

SEQ ID NO: 1846 - protein, 9 aa, Artificial Sequence
  Description of Artificial Sequence: Synthetic peptide
AFYGWFAKK

SEQ ID NO: 1847 - protein, 9 aa, Artificial Sequence
  Description of Artificial Sequence: Synthetic peptide
AFYKWFAKK

SEQ ID NO: 1848 - protein, 13 aa, Artificial Sequence
  Description of Artificial Sequence: Synthetic peptide
  MOD_RES (13): Lig
  SITE (13): This residue is chemically linked to the C-terminus of SEQ ID NO: 1849
SDGFYNAIELLSX

SEQ ID NO: 1849 - protein, 13 aa, Artificial Sequence
  Description of Artificial Sequence: Synthetic peptide
  MOD_RES (13): Lig
SDGFYNAIELLSX

SEQ ID NO: 1850 - protein, 10 aa, Artificial Sequence
  Description of Artificial Sequence: Synthetic peptide
  MOD_RES (10): Lig
  SITE (10): This residue is chemically linked to the C-terminus of SEQ ID NO: 1851
AFYDWFAKKX

SEQ ID NO: 1851 - protein, 10 aa, Artificial Sequence
  Description of Artificial Sequence: Synthetic peptide
  MOD_RES (10): Lig
AFYDWFAKKX

SEQ ID NO: 1852 - protein, 16 aa, Artificial Sequence
  Description of Artificial Sequence: Synthetic peptide
FHENAYDWFVRQVSKK

SEQ ID NO: 1853 - protein, 16 aa, Artificial Sequence
  Description of Artificial Sequence: Synthetic peptide
FHENFADWFVRQVSKK

SEQ ID NO: 1854 - protein, 16 aa, Artificial Sequence
  Description of Artificial Sequence: Synthetic peptide
FHENFYAWFVRQVSKK

SEQ ID NO: 1855 - protein, 16 aa, Artificial Sequence
  Description of Artificial Sequence: Synthetic peptide
FHENFYDAFVRQVSKK

SEQ ID NO: 1856 - protein, 16 aa, Artificial Sequence
  Description of Artificial Sequence: Synthetic peptide
FHENFYDWAVRQVSKK

SEQ ID NO: 1857 - protein, 20 aa, Artificial Sequence
  Description of Artificial Sequence: Synthetic peptide
QLEEEWAGVQCEVYGRECPS

SEQ ID NO: 1858 - protein, 19 aa, Artificial Sequence
  Description of Artificial Sequence: Synthetic peptide
CGGFHENFYDWFVRQVSKK

SEQ ID NO: 1859 - protein, 19 aa, Artificial Sequence
  Description of Artificial Sequence: Synthetic peptide
  SITE (1): This residue is chemically linked to the N-terminus of SEQ ID NO: 1860
CGGFHENFYDWFVRQVSKK

SEQ ID NO: 1860 - protein, 19 aa, Artificial Sequence
  Description of Artificial Sequence: Synthetic peptide
CGGFHENFYDWFVRQVSKK

SEQ ID NO: 1861 - protein, 13 aa, Artificial Sequence
  Description of Artificial Sequence: Synthetic peptide
  MOD_RES (13): Lig
  SITE (13): This residue is chemically linked to the C-terminus of SEQ ID NO: 1862
SDGFYNAIELLSX

SEQ ID NO: 1862 - protein, 24 aa, Artificial Sequence
  Description of Artificial Sequence: Synthetic peptide
  MOD_RES (24): Lig
KHLCVLEELFWGASLFGYCSGKKX

SEQ ID NO: 1863 - protein, 20 aa, Artificial Sequence
  Description of Artificial Sequence: Synthetic peptide
  MOD_RES (20): Lig
  SITE (20): This residue is chemically linked to the C-terminus of SEQ ID NO: 1864
FHENFYDWFVRQVSKKGGGX

SEQ ID NO: 1864 - protein, 20 aa, Artificial Sequence
  Description of Artificial Sequence: Synthetic peptide
  MOD_RES (20): Lig
FHENFYDWFVRQVSKKGGGX

SEQ ID NO: 1865 - protein, 20 aa, Artificial Sequence
  Description of Artificial Sequence: Synthetic peptide
  MOD_RES (1): Lig
  SITE (1): This residue is chemically linked to the N-terminus of SEQ ID NO: 1866
XGGGFHENFYDWFVRQVSKK

SEQ ID NO: 1866 - protein, 20 aa, Artificial Sequence
  Description of Artificial Sequence: Synthetic peptide
  MOD_RES (1): Lig
XGGGFHENFYDWFVRQVSKK

SEQ ID NO: 1867 - protein, 17 aa, Artificial Sequence
  Description of Artificial Sequence: Synthetic peptide
  MOD_RES (17): Lig
  SITE (17): This residue is chemically linked to the C-terminus of SEQ ID NO: 1868
FHENFYDWFVRQVSKKX

SEQ ID NO: 1868 - protein, 13 aa, Artificial Sequence
  Description of Artificial Sequence: Synthetic peptide
  MOD_RES (13): Lig
SDGFYNAIELLSX

SEQ ID NO: 1869 - protein, 20 aa, Artificial Sequence
  Description of Artificial Sequence: Synthetic peptide
RVDWLQRNANFYDWFVAELG

SEQ ID NO: 1870 - protein, 19 aa, Artificial Sequence
  Description of Artificial Sequence: Synthetic peptide
VDWLQRNANFYDWFVAELG

SEQ ID NO: 1871 - protein, 18 aa, Artificial Sequence
  Description of Artificial Sequence: Synthetic peptide
DWLQRNANFYDWFVAELG

SEQ ID NO: 1872 - protein, 17 aa, Artificial Sequence
  Description of Artificial Sequence: Synthetic peptide
WLQRNANFYDWFVAELG

SEQ ID NO: 1873 - protein, 16 aa, Artificial Sequence
  Description of Artificial Sequence: Synthetic peptide
LQRNANFYDWFVAELG

SEQ ID NO: 1874 - protein, 15 aa, Artificial Sequence
  Description of Artificial Sequence: Synthetic peptide
QRNANFYDWFVAELG

SEQ ID NO: 1875 - protein, 14 aa, Artificial Sequence
  Description of Artificial Sequence: Synthetic peptide
RNANFYDWFVAELG

SEQ ID NO: 1876 - protein, 13 aa, Artificial Sequence
  Description of Artificial Sequence: Synthetic peptide
NANFYDWFVAELG

SEQ ID NO: 1877 - protein, 12 aa, Artificial Sequence
  Description of Artificial Sequence: Synthetic peptide
ANFYDWFVAELG

SEQ ID NO: 1878 - protein, 11 aa, Artificial Sequence
  Description of Artificial Sequence: Synthetic peptide
NFYDWFVAELG

SEQ ID NO: 1879 - protein, 22 aa, Artificial Sequence
  Description of Artificial Sequence: Synthetic peptide
  MOD_RES (22): Lig
GRVDWLQRNANFYDWFVAELGX

SEQ ID NO: 1880 - protein, 22 aa, Artificial Sequence
  Description of Artificial Sequence: Synthetic peptide
  MOD_RES (1): Lig
XGRVDWLQRNANFYDWFVAELG

SEQ ID NO: 1881 - protein, 15 aa, Artificial Sequence
  Description of Artificial Sequence: Synthetic peptide
  MOD_RES (15): Lig
  SITE (15): This residue is chemically linked to the C-terminus of SEQ ID NO: 1882
ACAWPTYWNCGGGGX

SEQ ID NO: 1882 - protein, 17 aa, Artificial Sequence
  Description of Artificial Sequence: Synthetic peptide
  MOD_RES (17): Lig
FHENFYDWFVRQVSKKX

SEQ ID NO: 1883 - protein, 20 aa, Artificial Sequence
  Description of Artificial Sequence: Synthetic peptide
GRVDWLQRNANFYDWFVAEL

SEQ ID NO: 1884 - protein, 19 aa, Artificial Sequence
  Description of Artificial Sequence: Synthetic peptide
GRVDWLQRNANFYDWFVAE

SEQ ID NO: 1885 - protein, 18 aa, Artificial Sequence
  Description of Artificial Sequence: Synthetic peptide
GRVDWLQRNANFYDWFVA

SEQ ID NO: 1886 - protein, 17 aa, Artificial Sequence
  Description of Artificial Sequence: Synthetic peptide
GRVDWLQRNANFYDWFV

SEQ ID NO: 1887 - protein, 13 aa, Artificial Sequence
  Description of Artificial Sequence: Synthetic peptide
  MOD_RES (13): Lig
  SITE (13): This residue is chemically linked to the C-terminus of SEQ ID NO: 1888
SDGFYNAIELLSX

SEQ ID NO: 1888 - protein, 13 aa, Artificial Sequence
  Description of Artificial Sequence: Synthetic peptide
  MOD_RES (13): Lig
SDGFYNAIELLSX

SEQ ID NO: 1889 - protein, 22 aa, Artificial Sequence
  Description of Artificial Sequence: Synthetic peptide
  MOD_RES (22): Lig
  SITE (22): This residue is chemically linked to the C-terminus of SEQ ID NO: 1890
GRVDWLQRNANFYDWFVAELGX

SEQ ID NO: 1890 - protein, 22 aa, Artificial Sequence
  Description of Artificial Sequence: Synthetic peptide
  MOD_RES (22): Lig
GRVDWLQRNANFYDWFVAELGX

SEQ ID NO: 1891 - protein, 16 aa, Artificial Sequence
  Description of Artificial Sequence: Synthetic peptide
  MOD_RES (16): Lig
  SITE (16): This residue is chemically linked to the C-terminus of SEQ ID NO: 1892
SDGFYNAIELLSGGGX

SEQ ID NO: 1892 - protein, 16 aa, Artificial Sequence
  Description of Artificial Sequence: Synthetic peptide
  MOD_RES (16): Lig
SDGFYNAIELLSGGGX

SEQ ID NO: 1893 - protein, 15 aa, Artificial Sequence
  Description of Artificial Sequence: Synthetic peptide
  MOD_RES (1): Acy
  MOD_RES (11): Tic
XCLEEWGASLXQCSG

SEQ ID NO: 1894 - protein, 17 aa, Artificial Sequence
  Description of Artificial Sequence: Synthetic peptide
RWPNFYGYFESLLTHFS

SEQ ID NO: 1895 - protein, 17 aa, Artificial Sequence
  Description of Artificial Sequence: Synthetic peptide
EGWDFYSYFSGLLASVT

SEQ ID NO: 1896 - protein, 17 aa, Artificial Sequence
  Description of Artificial Sequence: Synthetic peptide
LDRQFYRYFQDLLVGFM

SEQ ID NO: 1897 - protein, 17 aa, Artificial Sequence
  Description of Artificial Sequence: Synthetic peptide
WGRSFYRYFETLLAQGI

SEQ ID NO: 1898 - protein, 20 aa, Artificial Sequence
  Description of Artificial Sequence: Synthetic peptide
PLCFLQELFGGASLGGYCSG

SEQ ID NO: 1899 - protein, 20 aa, Artificial Sequence
  Description of Artificial Sequence: Synthetic peptide
WLEQERAWIWCEIQGSGCRA

SEQ ID NO: 1900 - protein, 21 aa, Artificial Sequence
  Description of Artificial Sequence: Synthetic peptide
IQGWEPFYGWFDDVVAQMFEE

SEQ ID NO: 1901 - protein, 21 aa, Artificial Sequence
  Description of Artificial Sequence: Synthetic peptide
TGHRLGLDEQFYWWFRDALSG

SEQ ID NO: 1902 - protein, 15 aa, Artificial Sequence
  Description of Artificial Sequence: Synthetic peptide
  MOD_RES (1): Abu
  MOD_RES (11): Tic
XCLEEWGASLXQCSG

SEQ ID NO: 1903 - protein, 11 aa, Artificial Sequence
  Description of Artificial Sequence: Synthetic peptide
  MOD_RES (3): Hyp
RDXFYDWFDDI

SEQ ID NO: 1904 - protein, 30 aa, Artificial Sequence
  Description of Artificial Sequence: Synthetic peptide
  MOD_RES (17)..(18): Lig
FHENFYDWFVRQVSKKXXSDGFYNAIELLS

SEQ ID NO: 1905 - protein, 16 aa, Artificial Sequence
  Description of Artificial Sequence: Synthetic peptide
GFREGQRWYWFVAQVT

SEQ ID NO: 1906 - protein, 20 aa, Artificial Sequence
  Description of Artificial Sequence: Synthetic peptide
DLRVLCELFGGAYVLGYCSE

SEQ ID NO: 1907 - protein, 20 aa, Artificial Sequence
  Description of Artificial Sequence: Synthetic peptide
HLSVGEELSWWVALLGQWAR

SEQ ID NO: 1908 - protein, 20 aa, Artificial Sequence
  Description of Artificial Sequence: Synthetic peptide
APVSTEELRWGALLFGQWAG

SEQ ID NO: 1909 - protein, 20 aa, Artificial Sequence
  Description of Artificial Sequence: Synthetic peptide
ALEEEWAWVQVRSIRSGLPL

SEQ ID NO: 1910 - protein, 20 aa, Artificial Sequence
  Description of Artificial Sequence: Synthetic peptide
WLEHEWAQIQCELYGRGCTY

SEQ ID NO: 1911 - protein, 17 aa, Artificial Sequence
  Description of Artificial Sequence: Synthetic peptide
QAPSNFYDWFVREWDEE

SEQ ID NO: 1912 - protein, 17 aa, Artificial Sequence
  Description of Artificial Sequence: Synthetic peptide
QSFYDYIEELLGGEWKK

SEQ ID NO: 1913 - protein, 17 aa, Artificial Sequence
  Description of Artificial Sequence: Synthetic peptide
DPFYQGLWEWLRESGEE

SEQ ID NO: 1914 - protein, 20 aa, Artificial Sequence
  Description of Artificial Sequence: Synthetic peptide
  MOD_RES (1): Lig
  SITE (1): This residue is chemically linked to the N-terminus of SEQ ID NO: 1915
XGGGFHENFYDWFVRQVSKK

SEQ ID NO: 1915 - protein, 20 aa, Artificial Sequence
  Description of Artificial Sequence: Synthetic peptide
  MOD_RES (1): Lig
XGGGFHENFYDWFVRQVSKK

SEQ ID NO: 1916 - protein, 20 aa, Artificial Sequence
  Description of Artificial Sequence: Synthetic peptide
  MOD_RES (1): Lig
  SITE (1): This residue is chemically linked to the N-terminus of SEQ ID NO: 1917
XGGGFHENFYDWFVRQVSKK

SEQ ID NO: 1917 - protein, 20 aa, Artificial Sequence
  Description of Artificial Sequence: Synthetic peptide
  MOD_RES (1): Lig
XGGGFHENFYDWFVRQVSKK

SEQ ID NO: 1918 - protein, 20 aa, Artificial Sequence
  Description of Artificial Sequence: Synthetic peptide
  MOD_RES (1): Lig
  SITE (1): This residue is chemically linked to the N-terminus of SEQ ID NO: 1919
XGGGFHENFYDWFVRQVSKK

SEQ ID NO: 1919 - protein, 20 aa, Artificial Sequence
  Description of Artificial Sequence: Synthetic peptide
  MOD_RES (1): Lig
XGGGFHENFYDWFVRQVSKK

SEQ ID NO: 1920 - protein, 20 aa, Artificial Sequence
  Description of Artificial Sequence: Synthetic peptide
  MOD_RES (1): Lig
  SITE (1): This residue is chemically linked to the N-terminus of SEQ ID NO: 1921
XGGGFHENFYDWFVRQVSKK

SEQ ID NO: 1921 - protein, 20 aa, Artificial Sequence
  Description of Artificial Sequence: Synthetic peptide
  MOD_RES (1): Lig
XGGGFHENFYDWFVRQVSKK

SEQ ID NO: 1922 - protein, 18 aa, Artificial Sequence
  Description of Artificial Sequence: Synthetic peptide
  MOD_RES (18): Lig
DWLQRNANFYDWFVAELX

SEQ ID NO: 1923 - protein, 18 aa, Artificial Sequence
  Description of Artificial Sequence: Synthetic peptide
  MOD_RES (1): Lig
XDWLQRNANFYDWFVAEL

SEQ ID NO: 1924 - protein, 17 aa, Artificial Sequence
  Description of Artificial Sequence: Synthetic peptide
  MOD_RES (17): Lig
  SITE (17): This residue is chemically linked to the C-terminus of SEQ ID NO: 1925
DWLQRNANFYDWFVAEX

SEQ ID NO: 1925 - protein, 17 aa, Artificial Sequence
  Description of Artificial Sequence: Synthetic peptide
  MOD_RES (17): Lig
DWLQRNANFYDWFVAEX

SEQ ID NO: 1926 - protein, 18 aa, Artificial Sequence
  Description of Artificial Sequence: Synthetic peptide
  MOD_RES (1): Lig
  SITE (1): This residue is chemically linked to the N-terminus of SEQ ID NO: 1927
XDWLQRNANFYDWFVAEL

SEQ ID NO: 1927 - protein, 18 aa, Artificial Sequence
  Description of Artificial Sequence: Synthetic peptide
  MOD_RES (1): Lig
XDWLQRNANFYDWFVAEL

SEQ ID NO: 1928 - protein, 13 aa, Artificial Sequence
  Description of Artificial Sequence: Synthetic peptide
  MOD_RES (8): Acy
SDGFYNAXELLSG

SEQ ID NO: 1929 - protein, 14 aa, Artificial Sequence
  Description of Artificial Sequence: Synthetic peptide
  MOD_RES (8): Acy
  MOD_RES (13): Aib
SGPFYEEXELLWXG

SEQ ID NO: 1930 - protein, 14 aa, Artificial Sequence
  Description of Artificial Sequence: Synthetic peptide
  MOD_RES (8): Acy
  MOD_RES (10): Aib
  MOD_RES (13): Aib
GGSFYDDXEXLWXG

SEQ ID NO: 1931 - protein, 14 aa, Artificial Sequence
  Description of Artificial Sequence: Synthetic peptide
  MOD_RES (2): Aib
  MOD_RES (8): Acy
  MOD_RES (11): Cha
  MOD_RES (13): Aib
NXPFYDEXDEXWXG

SEQ ID NO: 1932 - protein, 21 aa, Artificial Sequence
  Description of Artificial Sequence: Synthetic peptide
  MOD_RES (20): Acy
GRVDWLQRNANFYDWFVAEXG

SEQ ID NO: 1933 - protein, 20 aa, Artificial Sequence
  Description of Artificial Sequence: Synthetic peptide
  MOD_RES (1): Lig
  SITE (1): This residue is chemically linked to the N-terminus of SEQ ID NO: 1934
XGGGFHENFYDWFVRQVSKK

SEQ ID NO: 1934 - protein, 20 aa, Artificial Sequence
  Description of Artificial Sequence: Synthetic peptide
  MOD_RES (1): Lig
XGGGFHENFYDWFVRQVSKK

SEQ ID NO: 1935 - protein, 13 aa, Artificial Sequence
  Description of Artificial Sequence: Synthetic peptide
  MOD_RES (13): Lig
  SITE (13): This residue is chemically linked to the C-terminus of SEQ ID NO: 1935
SDGFYNAIELLSX

SEQ ID NO: 1936 - protein, 13 aa, Artificial Sequence
  Description of Artificial Sequence: Synthetic peptide
  MOD_RES (13): Lig
SDGFYNAIELLSX

SEQ ID NO: 1937 - protein, 8 aa, Artificial Sequence
  Description of Artificial Sequence: Synthetic peptide
WFYDWFWE

SEQ ID NO: 1938 - protein, 8 aa, Artificial Sequence
  Description of Artificial Sequence: Synthetic peptide
WQGYAWLS

SEQ ID NO: 1939 - protein, 8 aa, Artificial Sequence
  Description of Artificial Sequence: Synthetic peptide
WPGYAWLS

SEQ ID NO: 1940 - protein, 15 aa, Artificial Sequence
  Description of Artificial Sequence: Synthetic peptide
  MOD_RES (2): Aic
  MOD_RES (4): Aib
DXDXEFYDWFDEIPQ

SEQ ID NO: 1941 - protein, 15 aa, Artificial Sequence
  Description of Artificial Sequence: Synthetic peptide
KNNKEFYEWFDEIGQ

SEQ ID NO: 1942 - protein, 15 aa, Artificial Sequence
  Description of Artificial Sequence: Synthetic peptide
  MOD_RES (5): Hyp
YERDXFYDWFDEIGQ

SEQ ID NO: 1943 - protein, 15 aa, Artificial Sequence
  Description of Artificial Sequence: Synthetic peptide
  MOD_RES (5): Hyp
  MOD_RES (14): Hyp
EWRDXFYDWFDEIXE

SEQ ID NO: 1944 - protein, 19 aa, Artificial Sequence
  Description of Artificial Sequence: Synthetic peptide
  MOD_RES (1): Lig
  SITE (1): This residue is chemically linked to the N-terminus of SEQ ID NO: 1945
XGSLDESFYDWFERQLGKK

SEQ ID NO: 1945 - protein, 19 aa, Artificial Sequence
  Description of Artificial Sequence: Synthetic peptide
  MOD_RES (1): Lig
XGSLDESFYDWFERQLGKK

SEQ ID NO: 1946 - protein, 27 aa, Artificial Sequence
  Description of Artificial Sequence: Synthetic peptide
TFYSCLASLLTGTPQPNRGPWERCRKK

SEQ ID NO: 1947 - protein, 17 aa, Artificial Sequence
  Description of Artificial Sequence: Synthetic peptide
  MOD_RES (1): Lig
  SITE (1): This residue is chemically linked to the N-terminus of SEQ ID NO: 1948
XFHENFYDWFVRQVSKK

SEQ ID NO: 1948 - protein, 17 aa, Artificial Sequence
  Description of Artificial Sequence: Synthetic peptide
  MOD_RES (1): Lig
XFHENFYDWFVRQVSKK

SEQ ID NO: 1949 - protein, 23 aa, Artificial Sequence
  Description of Artificial Sequence: Synthetic peptide
KHLCVLEELFWGASLFGYCSGKK

SEQ ID NO: 1950 - protein, 19 aa, Artificial Sequence
  Description of Artificial Sequence: Synthetic peptide
  MOD_RES (19): Lig
  SITE (19): This residue is chemically linked to the C-terminus of SEQ ID NO: 1951
GSLDESFYDWFERQLGKKX

SEQ ID NO: 1951 - protein, 19 aa, Artificial Sequence
  Description of Artificial Sequence: Synthetic peptide
  MOD_RES (19): Lig
GSLDESFYDWFERQLGKKX

SEQ ID NO: 1952 - protein, 19 aa, Artificial Sequence
  Description of Artificial Sequence: Synthetic peptide
  MOD_RES (1): Lig
  SITE (1): This residue is chemically linked to the N-terminus of SEQ ID NO: 1953
XGSLDESFYDWFERQLGKK

SEQ ID NO: 1953 - protein, 19 aa, Artificial Sequence
  Description of Artificial Sequence: Synthetic peptide
  MOD_RES (1): Lig
XGSLDESFYDWFERQLGKK

SEQ ID NO: 1954 - protein, 20 aa, Artificial Sequence
  Description of Artificial Sequence: Synthetic peptide
  MOD_RES (1): Lig
  SITE (1): This residue is chemically linked to the N-terminus of SEQ ID NO: 1955
XGGGFHENFYDWFVRQVSKK

SEQ ID NO: 1955 - protein, 20 aa, Artificial Sequence
  Description of Artificial Sequence: Synthetic peptide
  MOD_RES (1): Lig
XGGGFHENFYDWFVRQVSKK

SEQ ID NO: 1956 - protein, 19 aa, Artificial Sequence
  Description of Artificial Sequence: Synthetic peptide
  MOD_RES (19): Lig
  SITE (19): This residue is chemically linked to the C-terminus of SEQ ID NO: 1957
GSLDESFYDWFERQLGKKX

SEQ ID NO: 1957 - protein, 19 aa, Artificial Sequence
  Description of Artificial Sequence: Synthetic peptide
  MOD_RES (19): Lig
GSLDESFYDWFERQLGKKX

SEQ ID NO: 1958 - protein, 19 aa, Artificial Sequence
  Description of Artificial Sequence: Synthetic peptide
  MOD_RES (1): Lig
  SITE (1): This residue is chemically linked to the N-terminus of SEQ ID NO: 1959
XGSLDESFYDWFERQLGKK

SEQ ID NO: 1959 - protein, 19 aa, Artificial Sequence
  Description of Artificial Sequence: Synthetic peptide
  MOD_RES (1): Lig
XGSLDESFYDWFERQLGKK

SEQ ID NO: 1960 - protein, 19 aa, Artificial Sequence
  Description of Artificial Sequence: Synthetic peptide
  MOD_RES (19): Lig
  SITE (19): This residue is chemically linked to the C-terminus of SEQ ID NO: 1961
GSLDESFYDWFERQLGKKX

SEQ ID NO: 1961 - protein, 19 aa, Artificial Sequence
  Description of Artificial Sequence: Synthetic peptide
  MOD_RES (19): Lig
GSLDESFYDWFERQLGKKX

SEQ ID NO: 1962 - protein, 21 aa, Artificial Sequence
  Description of Artificial Sequence: Synthetic peptide
DLWFNAKEDMNFYDWFVWQLR

SEQ ID NO: 1963 - protein, 22 aa, Artificial Sequence
  Description of Artificial Sequence: Synthetic peptide
EHWNTVDPFYHWISELLRESGA

SEQ ID NO: 1964 - protein, 22 aa, Artificial Sequence
  Description of Artificial Sequence: Synthetic peptide
EHWNTVDPFYQYFAELLRESGA

SEQ ID NO: 1965 - protein, 20 aa, Artificial Sequence
  Description of Artificial Sequence: Synthetic peptide
  MOD_RES (1): Lig
  SITE (1): This residue is chemically linked to the N-terminus of SEQ ID NO: 1966
XGGGFHENFYDWFVRQVSKK

SEQ ID NO: 1966 - protein, 20 aa, Artificial Sequence
  Description of Artificial Sequence: Synthetic peptide
  MOD_RES (1): Lig
XGGGFHENFYDWFVRQVSKK

SEQ ID NO: 1967 - protein, 19 aa, Artificial Sequence
  Description of Artificial Sequence: Synthetic peptide
  MOD_RES (19): Lig
  SITE (19): This residue is chemically linked to the C-terminus of SEQ ID NO: 1968
GSLDESFYDWFERQLGKKX

SEQ ID NO: 1968 - protein, 19 aa, Artificial Sequence
  Description of Artificial Sequence: Synthetic peptide
  MOD_RES (19): Lig
GSLDESFYDWFERQLGKKX

SEQ ID NO: 1969 - protein, 19 aa, Artificial Sequence
  Description of Artificial Sequence: Synthetic peptide
  MOD_RES (1): Lig
  SITE (1): This residue is chemically linked to the N-terminus of SEQ ID NO: 1970
XGSLDESFYDWFERQLGKK

SEQ ID NO: 1970 - protein, 19 aa, Artificial Sequence
  Description of Artificial Sequence: Synthetic peptide
  MOD_RES (1): Lig
XGSLDESFYDWFERQLGKK

SEQ ID NO: 1971 - protein, 20 aa, Artificial Sequence
  Description of Artificial Sequence: Synthetic peptide
  MOD_RES (1): Lig
  SITE (1): This residue is chemically linked to the N-terminus of SEQ ID NO: 1972
XGGGFHENFYDWFVRQVSKK

SEQ ID NO: 1972 - protein, 20 aa, Artificial Sequence
  Description of Artificial Sequence: Synthetic peptide
  MOD_RES (1): Lig
XGGGFHENFYDWFVRQVSKK

SEQ ID NO: 1973 - protein, 19 aa, Artificial Sequence
  Description of Artificial Sequence: Synthetic peptide
  MOD_RES (19): Lig
  SITE (19): This residue is chemically linked to the C-terminus of SEQ ID NO: 1974
GSLDESFYDWFERQLGKKX

SEQ ID NO: 1974 - protein, 19 aa, Artificial Sequence
  Description of Artificial Sequence: Synthetic peptide
  MOD_RES (19): Lig
GSLDESFYDWFERQLGKKX

SEQ ID NO: 1975 - protein, 19 aa, Artificial Sequence
  Description of Artificial Sequence: Synthetic peptide
  MOD_RES (1): Lig
  SITE (1): This residue is chemically linked to the N-terminus of SEQ ID NO: 1976
XGSLDESFYDWFERQLGKK

SEQ ID NO: 1976 - protein, 19 aa, Artificial Sequence
  Description of Artificial Sequence: Synthetic peptide
  MOD_RES (1): Lig
XGSLDESFYDWFERQLGKK

SEQ ID NO: 1977 - protein, 18 aa, Artificial Sequence
  Description of Artificial Sequence: Synthetic peptide
  MOD_RES (1): Lig
  SITE (1): This residue is chemically linked to the N-terminus of SEQ ID NO: 1978
XDWLQRNANFYDWFVAEL

SEQ ID NO: 1978 - protein, 18 aa, Artificial Sequence
  Description of Artificial Sequence: Synthetic peptide
  MOD_RES (1): Lig
XDWLQRNANFYDWFVAEL

SEQ ID NO: 1979 - protein, 18 aa, Artificial Sequence
  Description of Artificial Sequence: Synthetic peptide
  MOD_RES (1): Lig
  SITE (1): This residue is chemically linked to the N-terminus of SEQ ID NO: 1980
XDWLQRNANFYDWFVAEL

SEQ ID NO: 1980 - protein, 18 aa, Artificial Sequence
  Description of Artificial Sequence: Synthetic peptide
  MOD_RES (1): Lig
XDWLQRNANFYDWFVAEL

SEQ ID NO: 1981 - protein, 19 aa, Artificial Sequence
  Description of Artificial Sequence: Synthetic peptide
  MOD_RES (19): Lig
  SITE (19): This residue is chemically linked to the C-terminus of SEQ ID NO: 1982
GSLDESFYDWFERQLGKKX

SEQ ID NO: 1982 - protein, 19 aa, Artificial Sequence
  Description of Artificial Sequence: Synthetic peptide
  MOD_RES (19): Lig
GSLDESFYDWFERQLGKKX

SEQ ID NO: 1983 - protein, 19 aa, Artificial Sequence
  Description of Artificial Sequence: Synthetic peptide
  MOD_RES (1): Lig
  SITE (1): This residue is chemically linked to the N-terminus of SEQ ID NO: 1984
XGSLDESFYDWFERQLGKK

SEQ ID NO: 1984 - protein, 19 aa, Artificial Sequence
  Description of Artificial Sequence: Synthetic peptide
  MOD_RES (1): Lig
XGSLDESFYDWFERQLGKK

SEQ ID NO: 1985 - protein, 20 aa, Artificial Sequence
  Description of Artificial Sequence: Synthetic peptide
  MOD_RES (1): Lig
  SITE (1): This residue is chemically linked to the N-terminus of SEQ ID NO: 1986
XGGGFHENFYDWFVRQVSKK

SEQ ID NO: 1986 - protein, 20 aa, Artificial Sequence
  Description of Artificial Sequence: Synthetic peptide
  MOD_RES (1): Lig
XGGGFHENFYDWFVRQVSKK

SEQ ID NO: 1987 - protein, 21 aa, Artificial Sequence
  Description of Artificial Sequence: Synthetic peptide
RMYFSTGAPQNFYDWFVQEWD

SEQ ID NO: 1988 - protein, 17 aa, Artificial Sequence
  Description of Artificial Sequence: Synthetic peptide
PLRESRNFYDWFVQQLE

SEQ ID NO: 1989 - protein, 19 aa, Artificial Sequence
  Description of Artificial Sequence: Synthetic peptide
RGTRSDPFYHKLSELLQGH

SEQ ID NO: 1990 - protein, 19 aa, Artificial Sequence
  Description of Artificial Sequence: Synthetic peptide
SGSLDESFYDWFERQLGKK

SEQ ID NO: 1991 - protein, 20 aa, Artificial Sequence
  Description of Artificial Sequence: Synthetic peptide
GSLDESFYDWFERQLGKKKS

SEQ ID NO: 1992 - protein, 19 aa, Artificial Sequence
  Description of Artificial Sequence: Synthetic peptide
  MOD_RES (1): Ald
  SITE (1): This residue is chemically linked to the N-terminus of SEQ ID NO: 1993
XGSLDESFYDWFERQLGKK

SEQ ID NO: 1993 - protein, 19 aa, Artificial Sequence
  Description of Artificial Sequence: Synthetic peptide
  MOD_RES (1): Ald
XGSLDESFYDWFERQLGKK

SEQ ID NO: 1994 - protein, 39 aa, Artificial Sequence
  Description of Artificial Sequence: Synthetic peptide
  MOD_RES (20)..(21): Ald
GSLDESFYDWFERQLGKKKXXGSLDESFYDWFERQLGKK

SEQ ID NO: 1995 - protein, 19 aa, Artificial Sequence
  Description of Artificial Sequence: Synthetic peptide
  MOD_RES (1): Ald
  SITE (1): This residue is chemically linked to the N-terminus of SEQ ID NO: 1996
XGSLDESFYDWFERQLGKK

SEQ ID NO: 1996 - protein, 19 aa, Artificial Sequence
  Description of Artificial Sequence: Synthetic peptide
  MOD_RES (1): Ald
XGSLDESFYDWFERQLGKK

SEQ ID NO: 1997 - protein, 20 aa, Artificial Sequence
  Description of Artificial Sequence: Synthetic peptide
  MOD_RES (20): Ald
  SITE (20): This residue is chemically linked to the C-terminus of SEQ ID NO: 1998
GSLDESFYDWFERQLGKKKX

SEQ ID NO: 1998 - protein, 20 aa, Artificial Sequence
  Description of Artificial Sequence: Synthetic peptide
  MOD_RES (20): Ald
GSLDESFYDWFERQLGKKKX

SEQ ID NO: 1999 - protein, 20 aa, Artificial Sequence
  Description of Artificial Sequence: Synthetic peptide
  MOD_RES (20): Ald
  SITE (20): This residue is chemically linked to the C-terminus of SEQ ID NO: 2000
GSLDESFYDWFERQLGKKKX

SEQ ID NO: 2000 - protein, 20 aa, Artificial Sequence
  Description of Artificial Sequence: Synthetic peptide
  MOD_RES (20): Ald
GSLDESFYDWFERQLGKKKX

SEQ ID NO: 2001 - protein, 20 aa, Artificial Sequence
  Description of Artificial Sequence: Synthetic peptide
  MOD_RES (20): Lig
  SITE (20): This residue is chemically linked to the C-terminus of SEQ ID NO: 2002
EEDWLQRNANFYDWFVAELX

SEQ ID NO: 2002 - protein, 20 aa, Artificial Sequence
  Description of Artificial Sequence: Synthetic peptide
  MOD_RES (20): Lig
EEDWLQRNANFYDWFVAELX

SEQ ID NO: 2003 - protein, 20 aa, Artificial Sequence
  Description of Artificial Sequence: Synthetic peptide
  MOD_RES (20): Lig
  SITE (20): This residue is chemically linked to the C-terminus of SEQ ID NO: 2004
EEDWLQRNANFYDWFVAELX

SEQ ID NO: 2004 - protein, 20 aa, Artificial Sequence
  Description of Artificial Sequence: Synthetic peptide
  MOD_RES (20): Lig
EEDWLQRNANFYDWFVAELX

SEQ ID NO: 2005 - protein, 15 aa, Artificial Sequence
  Description of Artificial Sequence: Synthetic peptide
SLDESFYDWFERQLG

SEQ ID NO: 2006 - protein, 14 aa, Artificial Sequence
  Description of Artificial Sequence: Synthetic peptide
LDESFYDWFERQLG

SEQ ID NO: 2007 - protein, 13 aa, Artificial Sequence
  Description of Artificial Sequence: Synthetic peptide
DESFYDWFERQLG

SEQ ID NO: 2008 - protein, 11 aa, Artificial Sequence
  Description of Artificial Sequence: Synthetic peptide
SFYDWFERQLG

SEQ ID NO: 2009 - protein, 10 aa, Artificial Sequence
  Description of Artificial Sequence: Synthetic peptide
FYDWFERQLG

SEQ ID NO: 2010 - protein, 12 aa, Artificial Sequence
  Description of Artificial Sequence: Synthetic peptide
GSLDESFYDWFE

SEQ ID NO: 2011 - protein, 11 aa, Artificial Sequence
  Description of Artificial Sequence: Synthetic peptide
GSLDESFYDWF

SEQ ID NO: 2012 - protein, 9 aa, Artificial Sequence
  Description of Artificial Sequence: Synthetic peptide
ESFYDWFER

SEQ ID NO: 2013 - protein, 8 aa, Artificial Sequence
  Description of Artificial Sequence: Synthetic peptide
ESFYDWFE

SEQ ID NO: 2014 - protein, 7 aa, Artificial Sequence
  Description of Artificial Sequence: Synthetic peptide
ESFYDWF

SEQ ID NO: 2015 - protein, 14 aa, Artificial Sequence
  Description of Artificial Sequence: Synthetic peptide
  MOD_RES (14): Lig
  SITE (14): This residue is chemically linked to the C-terminus of SEQ ID NO: 2016
ESFYDWFERQLGKX

SEQ ID NO: 2016 - protein, 14 aa, Artificial Sequence
  Description of Artificial Sequence: Synthetic peptide
  MOD_RES (14): Lig
ESFYDWFERQLGKX

SEQ ID NO: 2017 - protein, 14 aa, Artificial Sequence
  Description of Artificial Sequence: Synthetic peptide
  MOD_RES (14): Lig
  SITE (14): This residue is chemically linked to the C-terminus of SEQ ID NO: 2018
ESFYDWFERQLGKX

SEQ ID NO: 2018 - protein, 14 aa, Artificial Sequence
  Description of Artificial Sequence: Synthetic peptide
  MOD_RES (14): Lig
ESFYDWFERQLGKX

SEQ ID NO: 2019 - protein, 13 aa, Artificial Sequence
  Description of Artificial Sequence: Synthetic peptide
  MOD_RES (1): Lig
  SITE (1): This residue is chemically linked to the N-terminus of SEQ ID NO: 2020
XESFYDWFERQLG

SEQ ID NO: 2020 - protein, 13 aa, Artificial Sequence
  Description of Artificial Sequence: Synthetic peptide
  MOD_RES (1): Lig
XESFYDWFERQLG

SEQ ID NO: 2021 - protein, 13 aa, Artificial Sequence
  Description of Artificial Sequence: Synthetic peptide
  MOD_RES (1): Lig
  SITE (1): This residue is chemically linked to the N-terminus of SEQ ID NO: 2022
XESFYDWFERQLG

SEQ ID NO: 2022 - protein, 13 aa, Artificial Sequence
  Description of Artificial Sequence: Synthetic peptide
  MOD_RES (1): Lig
XESFYDWFERQLG

SEQ ID NO: 2023 - protein, 14 aa, Artificial Sequence
  Description of Artificial Sequence: Synthetic peptide
  MOD_RES (14): Ald
  SITE (14): This residue is chemically linked to the C-terminus of SEQ ID NO: 2024
ESFYDWFERQLGKX

SEQ ID NO: 2024 - protein, 14 aa, Artificial Sequence
  Description of Artificial Sequence: Synthetic peptide
  MOD_RES (14): Ald
ESFYDWFERQLGKX

SEQ ID NO: 2025 - protein, 24 aa, Artificial Sequence
  Description of Artificial Sequence: Synthetic peptide
  MOD_RES (1): Lig
  SITE (1): This residue is chemically linked to the N-terminus of SEQ ID NO: 2026
XEWLDQEWAWVQCEVYGRGCPSEE

SEQ ID NO: 2026 - protein, 24 aa, Artificial Sequence
  Description of Artificial Sequence: Synthetic peptide
  MOD_RES (1): Lig
XEWLDQEWAWVQCEVYGRGCPSEE

SEQ ID NO: 2027 - protein, 13 aa, Artificial Sequence
  Description of Artificial Sequence: Synthetic peptide
  MOD_RES (1): Ald
  SITE (1): This residue is chemically linked to the N-terminus of SEQ ID NO: 2028
XESFYDWFERQLG

SEQ ID NO: 2028 - protein, 13 aa, Artificial Sequence
  Description of Artificial Sequence: Synthetic peptide
  MOD_RES (1): Ald
XESFYDWFERQLG

SEQ ID NO: 2029 - protein, 13 aa, Artificial Sequence
  Description of Artificial Sequence: Synthetic peptide
  SITE (13): This residue is chemically linked to the C-terminus of SEQ ID NO: 2030
ESFYDWFERQLGK

SEQ ID NO: 2030 - protein, 11 aa, Artificial Sequence
  Description of Artificial Sequence: Synthetic peptide
ACAWPTYWNCG

SEQ ID NO: 2031 - protein, 43 aa, Artificial Sequence
  Description of Artificial Sequence: Synthetic peptide
  MOD_RES (19)..(20): Lig
GSLDESFYDWFERQLGKKXXEWLDQEWAWVQCEVYGRGCPSEE

SEQ ID NO: 2032 - protein, 43 aa, Artificial Sequence
  Description of Artificial Sequence: Synthetic peptide
  MOD_RES (24)..(25): Lig
EWLDQEWAWVQCEVYGRGCPSEEXXGSLDESFYDWFERQLGKK

SEQ ID NO: 2033 - protein, 16 aa, Artificial Sequence
  Description of Artificial Sequence: Synthetic peptide
  SITE (16): This residue is chemically linked to the C-terminus of SEQ ID NO: 2034
ESFYDWFERQLGGGGK

SEQ ID NO: 2034 - protein, 10 aa, Artificial Sequence
  Description of Artificial Sequence: Synthetic peptide
CEVYGRGCPS

SEQ ID NO: 2035 - protein, 16 aa, Artificial Sequence
  Description of Artificial Sequence: Synthetic peptide
  SITE (16): This residue is chemically linked to the C-terminus of SEQ ID NO: 2036
ESFYDWFERQLGGGGK

SEQ ID NO: 2036 - protein, 10 aa, Artificial Sequence
  Description of Artificial Sequence: Synthetic peptide
WLDQEWAWVQ

SEQ ID NO: 2037 - protein, 16 aa, Artificial Sequence
  Description of Artificial Sequence: Synthetic peptide
  SITE (16): This residue is chemically linked to the C-terminus of SEQ ID NO: 2038
ESFYDWFERQLGGGGK

SEQ ID NO: 2038 - protein, 20 aa, Artificial Sequence
  Description of Artificial Sequence: Synthetic peptide
WLDQEWAWVQCEVYGRGCPS

SEQ ID NO: 2039 - protein, 16 aa, Artificial Sequence
  Description of Artificial Sequence: Synthetic peptide
  SITE (16): This residue is chemically linked to the C-terminus of SEQ ID NO: 2040
ESFYDWFERQLGGGGK

SEQ ID NO: 2040 - protein, 19 aa, Artificial Sequence
  Description of Artificial Sequence: Synthetic peptide
LDQEWAWVQCEVYGRGCPS

SEQ ID NO: 2041 - protein, 16 aa, Artificial Sequence
  Description of Artificial Sequence: Synthetic peptide
  SITE (16): This residue is chemically linked to the C-terminus of SEQ ID NO: 2042
ESFYDWFERQLGGGGK

SEQ ID NO: 2042 - protein, 18 aa, Artificial Sequence
  Description of Artificial Sequence: Synthetic peptide
DQEWAWVQCEVYGRGCPS

SEQ ID NO: 2043 - protein, 16 aa, Artificial Sequence
  Description of Artificial Sequence: Synthetic peptide
  SITE (16): This residue is chemically linked to the C-terminus of SEQ ID NO: 2044
ESFYDWFERQLGGGGK

SEQ ID NO: 2044 - protein, 17 aa, Artificial Sequence
  Description of Artificial Sequence: Synthetic peptide
QEWAWVQCEVYGRGCPS

SEQ ID NO: 2045 - protein, 16 aa, Artificial Sequence
  Description of Artificial Sequence: Synthetic peptide
  SITE (16): This residue is chemically linked to the C-terminus of SEQ ID NO: 2046
ESFYDWFERQLGGGGK

SEQ ID NO: 2046 - protein, 16 aa, Artificial Sequence
  Description of Artificial Sequence: Synthetic peptide
EWAWVQCEVYGRGCPS

SEQ ID NO: 2047 - protein, 16 aa, Artificial Sequence
  Description of Artificial Sequence: Synthetic peptide
  SITE (16): This residue is chemically linked to the C-terminus of SEQ ID NO: 2048
ESFYDWFERQLGGGGK

SEQ ID NO: 2048 - protein, 15 aa, Artificial Sequence
  Description of Artificial Sequence: Synthetic peptide
WAWVQCEVYGRGCPS

SEQ ID NO: 2049 - protein, 16 aa, Artificial Sequence
  Description of Artificial Sequence: Synthetic peptide
  SITE (16): This residue is chemically linked to the C-terminus of SEQ ID NO: 2050
ESFYDWFERQLGGGGK

SEQ ID NO: 2050 - protein, 14 aa, Artificial Sequence
  Description of Artificial Sequence: Synthetic peptide
AWVQCEVYGRGCPS

SEQ ID NO: 2051 - protein, 16 aa, Artificial Sequence
  Description of Artificial Sequence: Synthetic peptide
  SITE (16): This residue is chemically linked to the C-terminus of SEQ ID NO: 2052
ESFYDWFERQLGGGGK

SEQ ID NO: 2052 - protein, 13 aa, Artificial Sequence
  Description of Artificial Sequence: Synthetic peptide
WVQCEVYGRGCPS

SEQ ID NO: 2053 - protein, 16 aa, Artificial Sequence
  Description of Artificial Sequence: Synthetic peptide
  SITE (16): This residue is chemically linked to the C-terminus of SEQ ID NO: 2054
ESFYDWFERQLGGGGK

SEQ ID NO: 2054 - protein, 12 aa, Artificial Sequence
  Description of Artificial Sequence: Synthetic peptide
VQCEVYGRGCPS

SEQ ID NO: 2055 - protein, 16 aa, Artificial Sequence
  Description of Artificial Sequence: Synthetic peptide
  SITE (16): This residue is chemically linked to the C-terminus of SEQ ID NO: 2056
ESFYDWFERQLGGGGK

SEQ ID NO: 2056 - protein, 11 aa, Artificial Sequence
  Description of Artificial Sequence: Synthetic peptide
QCEVYGRGCPS

SEQ ID NO: 2057 - protein, 45 aa, Artificial Sequence
  Description of Artificial Sequence: Synthetic peptide
  MOD_RES (20)..(21): Ald
GSLDESFYDWFERQLGKKKXXKEWLDQEWAWVQCEVYGRGCPSEE

SEQ ID NO: 2058 - protein, 20 aa, Artificial Sequence
  Description of Artificial Sequence: Synthetic peptide
  MOD_RES (20): Ald
  SITE (20): This residue is chemically linked to the C-terminus of SEQ ID NO: 2059
GSLDESFYDWFERQLGKKKX

SEQ ID NO: 2059 - protein, 25 aa, Artificial Sequence
  Description of Artificial Sequence: Synthetic peptide
  MOD_RES (25): Ald
EWLDQEWAWVQCEVYGRGCPSEEKX

SEQ ID NO: 2060 - protein, 44 aa, Artificial Sequence
  Description of Artificial Sequence: Synthetic peptide
  MOD_RES (25)..(26): Ald
EWLDQEWAWVQCEVYGRGCPSEEKXXGSLDESFYDWFERQLGKK

SEQ ID NO: 2061 - protein, 19 aa, Artificial Sequence
  Description of Artificial Sequence: Synthetic peptide
  MOD_RES (1): Ald
XGSLDESFYDWFERQLGKK

SEQ ID NO: 2062 - protein, 25 aa, Artificial Sequence
  Description of Artificial Sequence: Synthetic peptide
  MOD_RES (1): Ald
XKEWLDQEWAWVQCEVYGRGCPSEE

SEQ ID NO: 2063 - protein, 42 aa, Artificial Sequence
  Description of Artificial Sequence: Synthetic peptide
WLDQEWAWVQCEVYGRGCPSGGSGGSGSLDESFYDWFERQLG

SEQ ID NO: 2064 - protein, 42 aa, Artificial Sequence; identical to SEQ ID NO: 2063
  Description of Artificial Sequence: Synthetic peptide

SEQ ID NO: 2065 - protein, 42 aa, Artificial Sequence
  Description of Artificial Sequence: Synthetic peptide
GSLDESFYDWFERQLGGGSGGSWLDQEWAWVQCEVYGRGCPS

SEQ ID NO: 2066 - protein, 44 aa, Artificial Sequence; identical to SEQ ID NO: 2060
  Description of Artificial Sequence: Synthetic peptide
  MOD_RES (25)..(26): Ald

SEQ ID NO: 2067 - protein, 44 aa, Artificial Sequence; identical to SEQ ID NO: 2060
  Description of Artificial Sequence: Synthetic peptide
  MOD_RES (25)..(26): Ald

SEQ ID NO: 2068 - protein, 31 aa, Artificial Sequence
  Description of Artificial Sequence: Synthetic peptide
LDQEWAWVQCEVYGRGCPSESFYDWFERQLG

SEQ ID NO: 2069 - protein, 38 aa, Artificial Sequence
  Description of Artificial Sequence: Synthetic peptide
HHHHHHKLDQEWAWVQCEVYGRGCPSESFYDWFERQLG

SEQ ID NO: 2070 - protein, 31 aa, Artificial Sequence; identical to SEQ ID NO: 2068
  Description of Artificial Sequence: Synthetic peptide

SEQ ID NO: 2071 - protein, 30 aa, Artificial Sequence
  Description of Artificial Sequence: Synthetic peptide
LDEWAWVQCVEYGRGCPSESFYDWFERQLG

SEQ ID NO: 2072 - protein, 30 aa, Artificial Sequence
  Description of Artificial Sequence: Synthetic peptide
LDQEWAVQCEVYGRGCPSESFYDWFERQLG

SEQ ID NO: 2073 - protein, 30 aa, Artificial Sequence
  Description of Artificial Sequence: Synthetic peptide
LDQEWAWVCEVYGRGCPSESFYDWFERQLG

SEQ ID NO: 2074 - protein, 30 aa, Artificial Sequence
  Description of Artificial Sequence: Synthetic peptide
LDQEWAWVQCVYGRGCPSESFYDWFERQLG

SEQ ID NO: 2075 - protein, 30 aa, Artificial Sequence
  Description of Artificial Sequence: Synthetic peptide
LDQEWAWVQCEVYGRCPSESFYDWFERQLG

SEQ ID NO: 2076 - protein, 30 aa, Artificial Sequence
  Description of Artificial Sequence: Synthetic peptide
LDQEWAWVQCEVYGRGCSESFYDWFERQLG

SEQ ID NO: 2077 - protein, 30 aa, Artificial Sequence
  Description of Artificial Sequence: Synthetic peptide
LDQEWAWVQCEVYGRGCPESFYDWFERQLG

SEQ ID NO: 2078 - protein, 29 aa, Artificial Sequence
  Description of Artificial Sequence: Synthetic peptide
LDQEWAWVQCEVYGRGCESFYDWFERQLG

SEQ ID NO: 2079 - protein, 30 aa, Artificial Sequence
  Description of Artificial Sequence: Synthetic peptide
LDQEWAWVQCEVYGRGCPSEFYDWFERQLG

SEQ ID NO: 2080 - protein, 30 aa, Artificial Sequence
  Description of Artificial Sequence: Synthetic peptide
LDQEWAWVQCEVYGRGCPSESFYDWFRQLG

SEQ ID NO: 2081 - protein, 23 aa, Artificial Sequence
  Description of Artificial Sequence: Synthetic peptide
EWLDQEWAWVQCEVYGRGCPSEE

SEQ ID NO: 2082 - protein, 31 aa, Artificial Sequence
  Description of Artificial Sequence: Synthetic peptide
ADQEWAWVQCEVYGRGCPSESFYDWFERQLG

SEQ ID NO: 2083 - protein, 30 aa, Artificial Sequence
  Description of Artificial Sequence: Synthetic peptide
LAQEWAWVQCEVYGRGCPSESFYDWFERQL

SEQ ID NO: 2084 - protein, 30 aa, Artificial Sequence
  Description of Artificial Sequence: Synthetic peptide
LDAEWAWVQCEVYGRGCPSESFYDWFERQL

SEQ ID NO: 2085 - protein, 30 aa, Artificial Sequence
  Description of Artificial Sequence: Synthetic peptide
LDQAWAWVQCEVYGRGCPSESFYDWFERQL

SEQ ID NO: 2086 - protein, 30 aa, Artificial Sequence
  Description of Artificial Sequence: Synthetic peptide
LDQEAAWVQCEVYGRGCPSESFYDWFERQL

SEQ ID NO: 2087 - protein, 30 aa, Artificial Sequence
  Description of Artificial Sequence: Synthetic peptide
LDQEWAAVQCEVYGRGCPSESFYDWFERQL

SEQ ID NO: 2088 - protein, 30 aa, Artificial Sequence
  Description of Artificial Sequence: Synthetic peptide
LDQEWAWAQCEVYGRGCPSESFYDWFERQL

SEQ ID NO: 2089 - protein, 30 aa, Artificial Sequence
  Description of Artificial Sequence: Synthetic peptide
LDQEWAWVACEVYGRGCPSESFYDWFERQL

SEQ ID NO: 2090 - protein, 30 aa, Artificial Sequence
  Description of Artificial Sequence: Synthetic peptide
LDQEWAWVQCAVYGRGCPSESFYDWFERQL

SEQ ID NO: 2091 - protein, 30 aa, Artificial Sequence
  Description of Artificial Sequence: Synthetic peptide
LDQEWAWVQCEAYGRGCPSESFYDWFERQL

SEQ ID NO: 2092 - protein, 30 aa, Artificial Sequence
  Description of Artificial Sequence: Synthetic peptide
LDQEWAWVQCEVAGRGCPSESFYDWFERQL

SEQ ID NO: 2093 - protein, 30 aa, Artificial Sequence
  Description of Artificial Sequence: Synthetic peptide
LDQEWAWVQCEVYARGCPSESFYDWFERQL

SEQ ID NO: 2094 - protein, 30 aa, Artificial Sequence
  Description of Artificial Sequence: Synthetic peptide
LDQEWAWVQCEVYGAGCPSESFYDWFERQL

SEQ ID NO: 2095 - protein, 30 aa, Artificial Sequence
  Description of Artificial Sequence: Synthetic peptide
LDQEWAWVQCEVYGRACPSESFYDWFERQL

SEQ ID NO: 2096 - protein, 30 aa, Artificial Sequence
  Description of Artificial Sequence: Synthetic peptide
LDQEWAWVQCEVYGRGCASESFYDWFERQL

SEQ ID NO: 2097 - protein, 30 aa, Artificial Sequence
  Description of Artificial Sequence: Synthetic peptide
LDQEWAWVQSEVYGRGSPSESFYDWFERQL

SEQ ID NO: 2098 - protein, 42 aa, Artificial Sequence
  Description of Artificial Sequence: Synthetic peptide
SLEEEWAQVECEVYGRGCPSGGSGGSGLLDESFYHWFDRQLR

SEQ ID NO: 2099 - protein, 47 aa, Artificial Sequence
  Description of Artificial Sequence: Synthetic peptide
WLDQEWAWVQCEVYGRGCPSGGSGGSGRVDWLQRNANFYDWFVAELG

SEQ ID NO: 2100 - protein, 44 aa, Artificial Sequence
  Description of Artificial Sequence: Synthetic peptide
WLDQEWAWVQCEVYGRGCPSGGSGGSSQAGSAFYAWFDQVLRTV

SEQ ID NO: 2101 - protein, 44 aa, Artificial Sequence
  Description of Artificial Sequence: Synthetic peptide
WLDQEWAWVQCEVYGRGCPSGGSGGSQSDAFYSGLWALIGLSDG

SEQ ID NO: 2102 - protein, 19 aa, Artificial Sequence
  Description of Artificial Sequence: Synthetic peptide
LDQEWAWVQCEVYGRGCPS

SEQ ID NO: 2103 - protein, 28 aa, Artificial Sequence
  Description of Artificial Sequence: Synthetic peptide
  MOD_RES (2): Acy
  MOD_RES (12): Tic
HXCLEEWGASLXQCSGSESFYDWFERQL

SEQ ID NO: 2104 - protein, 31 aa, Artificial Sequence
  Description of Artificial Sequence: Synthetic peptide
SIEEEWAQIKCDVWGRGCPSESFYDWFERQL

SEQ ID NO: 2105 - protein, 36 aa, Artificial Sequence
  Description of Artificial Sequence: Synthetic peptide
RLEEEWAWVQCEVYGRGCPSGSLDESFYDWFERQLG

SEQ ID NO: 2106 - protein, 36 aa, Artificial Sequence
  Description of Artificial Sequence: Synthetic peptide
SLEEEWAQVECEVYGRGCPSGSLDESFYDWFERQLG

SEQ ID NO: 2107 - protein, 36 aa, Artificial Sequence
  Description of Artificial Sequence: Synthetic peptide
SIEEEWAQIKCDVWGRGCPPGLLDESFYHWFDRQLR

SEQ ID NO: 2108 - protein, 35 aa, Artificial Sequence
  Description of Artificial Sequence: Synthetic peptide
HLCVLEELFWGASLFGYCSGGSLDESFYDWFERQL

SEQ ID NO: 2109 - protein, 41 aa, Artificial Sequence
  Description of Artificial Sequence: Synthetic peptide
HLCVLEELFWGASLFGYCSGGRVDWLQRNANFYDWFVAELG

SEQ ID NO: 2110 - protein, 35 aa, Artificial Sequence
  Description of Artificial Sequence: Synthetic peptide
WLDQEWAWVQCEVYGRGCPSDSDWAGYEWFEEQLD

SEQ ID NO: 2111 - protein, 43 aa, Artificial Sequence
  Description of Artificial Sequence: Synthetic peptide
HHHHHHKSLEEEWAQVECEVYGRGCPSGSLDESFYDWFERQLG

SEQ ID NO: 2112 - protein, 70 aa, Artificial Sequence
  Description of Artificial Sequence: Synthetic peptide
MADYKDDDDKGSLDESFYDWFERQLGKKGGSGGSGSLDESFYDWFERQLGKKAAAGAPVPYPDPLEPRPG

SEQ ID NO: 2113 - protein, 76 aa, Artificial Sequence
  Description of Artificial Sequence: Synthetic peptide
MADYKDDDDKGSLDESFYDWFERQLGKKGGSGGSGGSGGSGSLDESFYDWFERQLGKKAAAGAPVPYPDPLEPRPG

SEQ ID NO: 2114 - protein, 72 aa, Artificial Sequence
  Description of Artificial Sequence: Synthetic peptide
MADYKDDDDKGSLDESFYDWFERQLGKKGGSGGSWLDQEWAWVQCEVYGRGCPSAAAGAPVPYPDPLEPRPG

SEQ ID NO: 2115 - protein, 78 aa, Artificial Sequence
  Description of Artificial Sequence: Synthetic peptide
MADYKDDDDKGSLDESFYDWFERQLGKKGGSGGSGGSGGSWLDQEWAWVQCEVYGRGCPSAAAGAPVPYPDPLEPRPG

SEQ ID NO: 2116 - protein, 72 aa, Artificial Sequence
  Description of Artificial Sequence: Synthetic peptide
MADYKDDDDKWLDQEWAWVQCEVYGRGCPSGGSGGSGSLDESFYDWFERQLGKKAAAGAPVPYPDPLEPRPG

SEQ ID NO: 2117 - protein, 16 aa, Artificial Sequence
  Description of Artificial Sequence: Synthetic peptide
FHENFYDWFVQRVSKK

SEQ ID NO: 2118 - protein, 14 aa, Artificial Sequence
  Description of Artificial Sequence: Synthetic peptide
GGTVWPGYEWLRNA

SEQ ID NO: 2119 - protein, 41 aa, Artificial Sequence
  Description of Artificial Sequence: Synthetic peptide
HLCVLEELFWGASLFGYCSGGGSGGSGSLDESFYDWFERQL

SEQ ID NO: 2120 - protein, 47 aa, Artificial Sequence
  Description of Artificial Sequence: Synthetic peptide
HLCVLEELFWGASLFGYCSGGGSGGSGGSGGSGSLDESFYDWFERQL

SEQ ID NO: 2121 - protein, 47 aa, Artificial Sequence; identical to SEQ ID NO: 2099
  Description of Artificial Sequence: Synthetic peptide

SEQ ID NO: 2122 - protein, 53 aa, Artificial Sequence
  Description of Artificial Sequence: Synthetic peptide
WLDQEWAWVQCEVYGRGCPSGGSGGSGGSGGSGRVDWLQRNANFYDWFVAELG

SEQ ID NO: 2123 - protein, 47 aa, Artificial Sequence
  Description of Artificial Sequence: Synthetic peptide
HLCVLEELFWGASLFGYCSGGGSGGSGRVDWLQRNANFYDWFVAELG

SEQ ID NO: 2124 - protein, 53 aa, Artificial Sequence
  Description of Artificial Sequence: Synthetic peptide
HLCVLEELFWGASLFGYCSGGGSGGSGGSGGSGRVDWLQRNANFYDWFVAELG

SEQ ID NO: 2125 - protein, 44 aa, Artificial Sequence
  Description of Artificial Sequence: Synthetic peptide
HLCVLEELFWGASLFGYCSGGGSGGSSQAGSAFYAWFDQVLRTV

SEQ ID NO: 2126 - protein, 51 aa, Artificial Sequence
  Description of Artificial Sequence: Synthetic peptide
HLCVLEELFWGASLFGYCSGGGSGGSTFYSCLASLLTGTPQPNRGPWERCR

SEQ ID NO: 2127 - protein, 44 aa, Artificial Sequence
  Description of Artificial Sequence: Synthetic peptide
HLCVLEELFWGASLFGYCSGGGSGGSQSDAFYSGLWALIGLSDG

SEQ ID NO: 2128 - protein, 41 aa, Artificial Sequence
  Description of Artificial Sequence: Synthetic peptide
HLCVLEELFWGASLFGYCSGGGSGGSDSDWAGYEWFEEQLD

SEQ ID NO: 2129 - protein, 20 aa, Artificial Sequence
  Description of Artificial Sequence: Synthetic peptide
WLDQEWAWVQCEVYGRGCPS

SEQ ID NO: 2130 - protein, 18 aa, Artificial Sequence
  Description of Artificial Sequence: Synthetic peptide
SQAGSAFYAWFDQVLRTV

SEQ ID NO: 2131 - protein, 18 aa, Artificial Sequence
  Description of Artificial Sequence: Synthetic peptide
QSDAFYSGLWALIGLSDG

SEQ ID NO: 2132 - protein, 62 aa, Artificial Sequence
  Description of Artificial Sequence: Synthetic peptide
NNNNLGIEGRISEFIEGRAQPAMAWLDQEWAWVQCEVYGRGCPSAAAGAPVPYPDPLEPRAA

SEQ ID NO: 2133 - protein, 89 aa, Artificial Sequence
  Description of Artificial Sequence: Synthetic peptide
NNNNLGIEGRISEFIEGRAQPAMAWLDQEWAWVQCEVYGRGCPSGGSGGSKWLDQEWAWVQCEVYGRGCPSAAAGAPVPYPDPLEPRAA

SEQ ID NO: 2134 - protein, 74 aa, Artificial Sequence
  Description of Artificial Sequence: Synthetic peptide
NNNNLGIEGRISEFIEGRDYKDDDDKFHENFYDWFVRQVSGSGSLDALDRLMRYFEERPSLGAPVPYPDPLEPR

SEQ ID NO: 2135 - protein, 83 aa, Artificial Sequence
  Description of Artificial Sequence: Synthetic peptide
NNNNLGIEGRISEFIEGRDYKDDDKFHENFYDWFVRQVSGGSGGSHLCVLEELFWGASLFGYCSGAAAGAPVPYPDPLEPRAA

SEQ ID NO: 2136 - protein, 89 aa, Artificial Sequence
  Description of Artificial Sequence: Synthetic peptide
NNNNLGIEGRISEFIEGRDYKDDDKFHENFYDWFVRQVSGGSGGSGGSGGSHLCVLEELFWGASLFGYCSGAAAGAPVPYPDPLEPRAA

SEQ ID NO: 2137 - protein, 86 aa, Artificial Sequence
  Description of Artificial Sequence: Synthetic peptide
NNNNLGIEGRISEFIEGRDYKDDDKFHENFYDWFVRQVSGGSGGSGGSHLCVLEELFWGASLFGYCSGAAAGAPVPYPDPLEPRAA

SEQ ID NO: 2138 - protein, 94 aa, Artificial Sequence
  Description of Artificial Sequence: Synthetic peptide
NNNNLGIEGRISEFIEVRAQPAMARGGGTFYEWFESALRKHGAGGGSGGSGGSGGSRGGGTFYEWFESALRKHGAGAAAGAPVPYPDPLEPRAA

SEQ ID NO: 2139 - protein, 79 aa, Artificial Sequence
  Description of Artificial Sequence: Synthetic peptide
NNNNLGIEGRISEFIEGRAQPAMAFHENFYDWFVRQVSGGSGGSGGSFHENFYDWFVRQVSAAAGAPVPYPDPLEPRAA

SEQ ID NO: 2140 - protein, 56 aa, Artificial Sequence
  Description of Artificial Sequence: Synthetic peptide
NNNNLGIEGRISEFIEGRAQPAMAFHENFYDWFVRQVSAAAGAPVPYPDPLEPRAA

SEQ ID NO: 2141 - protein, 88 aa, Artificial Sequence
  Description of Artificial Sequence: Synthetic peptide
NNNNLGIEGRISEFIEGRAQPAMARGGGTFYEWFESTLRKHGAGGGSGGSRGGGTFYEWFESALRKHGAGAAAGAPVPYPDPLEPRAA

SEQ ID NO: 2142 - protein, 90 aa, Artificial Sequence
  Description of Artificial Sequence: Synthetic peptide
NNNNLGIEGRISEFIEGRAQPAMAFHENFYDWFVRQVSGGSFHENFYDWFVRQVSGGSFHENFYDWFVRQVSAAAGAPVPYPDPLEPRAA

SEQ ID NO: 2143 - protein, 73 aa, Artificial Sequence
  Description of Artificial Sequence: Synthetic peptide
NNNNLGIEGRISEFIEGRAQPAMAFHENFYDWFVRQVSGGSGGSFHENFYDWFVRQVSGAPVPYPDPLEPRAA

SEQ ID NO: 2144 - protein, 88 aa, Artificial Sequence
  Description of Artificial Sequence: Synthetic peptide
NNNNLGIEGRISEFIEGRAQPAMAFHENFYDWFVRQVSGGSGGSGGSGGSAQPAMAFHENFYDWFVRQVSAAAGAPVPYPDPLEPRAA

SEQ ID NO: 2145 - protein, 62 aa, Artificial Sequence
  Description of Artificial Sequence: Synthetic peptide
NNNNLGIEGRISEFIEGRAQPAMARGGGTFYEWFESALRKHGAGAAAGAPVPYPDPLEPRAA

SEQ ID NO: 2146 - protein, 73 aa, Artificial Sequence
  Description of Artificial Sequence: Synthetic peptide
NNNNLGIEGRISEFIEGRAQPAMAFHENFYDWFVRQVSGGSFHENFYDWFVRQVSAAAGAPVPYPDPLEPRAA

SEQ ID NO: 2147 - protein, 57 aa, Artificial Sequence
  Description of Artificial Sequence: Synthetic peptide
NNNNLGIEGRISEFIEGRDYKDDDDKFHENFYDWFVRQVSAAGAPVPYPDPLEPRAA

SEQ ID NO: 2148 - protein, 64 aa, Artificial Sequence
  Description of Artificial Sequence: Synthetic peptide
NNNNLGIEGRISEFIEGRDYKDDDDKHLCVLEELFWGASLFGYCSGAAAGAPVPYPDPLEPRAA

SEQ ID NO: 2149 - protein, 56 aa, Artificial Sequence
  Description of Artificial Sequence: Synthetic peptide
NNNNLGIEGRISEFGSADYKDLDALDRLMRYFEERPSLAAAGAPVPYPDPLEPRAA

SEQ ID NO: 2150 - protein, 83 aa, Artificial Sequence; identical to SEQ ID NO: 2135
  Description of Artificial Sequence: Synthetic peptide

SEQ ID NO: 2151 - protein, 65 aa, Artificial Sequence
  Description of Artificial Sequence: Synthetic peptide
DYKDDDKFHENFYDWFVRQVSGGSGGSHLCVLEELFWGASLFGYCSGAAAGAPVPYPDPLEPRAA

SEQ ID NO: 2152 - protein, 89 aa, Artificial Sequence; identical to SEQ ID NO: 2136
  Description of Artificial Sequence: Synthetic peptide

SEQ ID NO: 2153 - protein, 71 aa, Artificial Sequence
  Description of Artificial Sequence: Synthetic peptide
DYKDDDKFHENFYDWFVRQVSGGSGGSGGSGGSHLCVLEELFWGASLFGYCSGAAAGAPVPYPDPLEPRAA

SEQ ID NO: 2154 - protein, 86 aa, Artificial Sequence; identical to SEQ ID NO: 2137
  Description of Artificial Sequence: Synthetic peptide

SEQ ID NO: 2155 - protein, 68 aa, Artificial Sequence
  Description of Artificial Sequence: Synthetic peptide
DYKDDDKFHENFYDWFVRQVSGGSGGSGGSHLCVLEELFWGASLFGYCSGAAAGAPVPYPDPLEPRAA

SEQ ID NO: 2156 - protein, 18 aa, Artificial Sequence
  Description of Artificial Sequence: Synthetic peptide
LCQRLGVGWPGWLSGWCA

SEQ ID NO: 2157 - protein, 17 aa, Artificial Sequence
  Description of Artificial Sequence: Synthetic peptide
LCQSWGVRIGWLTGLCP

SEQ ID NO: 2158 - protein, 62 aa, Artificial Sequence; identical to SEQ ID NO: 2132
  Description of Artificial Sequence: Synthetic peptide

SEQ ID NO: 2159 - protein, 89 aa, Artificial Sequence; identical to SEQ ID NO: 2133
  Description of Artificial Sequence: Synthetic peptide

SEQ ID NO: 2160 - protein, 64 aa, Artificial Sequence; identical to SEQ ID NO: 2148
  Description of Artificial Sequence: Synthetic peptide

SEQ ID NO: 2161 - protein, 90 aa, Artificial Sequence
  Description of Artificial Sequence: Synthetic peptide
NNNNLGIEGRISEFIEGRDYKDDDDKHLCVLEELFWGASLFGYCSGGGSGGSHLCVLEELFWGASLFGYCSGAAAGAPVPYPDPLEPRAA

SEQ ID NO: 2162 - protein, 96 aa, Artificial Sequence
  Description of Artificial Sequence: Synthetic peptide
NNNNLGIEGRISEFIEGRDYKDDDDKHLCVLEELFWGASLFGYCSGGGSGGSGGSGGSHLCVLEELFWGASLFGYCSGAAAGAPVPYPDPLEPRAA

SEQ ID NO: 2163 - protein, 116 aa, Artificial Sequence
  Description of Artificial Sequence: Synthetic peptide
NNNNLGIEGRISEFIEGRDYKDDDDKHLCVLEELFWGASLFGYCSGGGSGGSHLCVLEELFWGASLFGYCSGGGSGGSHLCVLEELFWGASLFGYCSGAAAGAPVPYPDPLEPRAA

SEQ ID NO: 2164 - protein, 56 aa, Artificial Sequence; identical to SEQ ID NO: 2140
  Description of Artificial Sequence: Synthetic peptide

SEQ ID NO: 2165 - protein, 73 aa, Artificial Sequence; identical to SEQ ID NO: 2146
  Description of Artificial Sequence: Synthetic peptide

SEQ ID NO: 2166 - protein, 71 aa, Artificial Sequence
  Description of Artificial Sequence: Synthetic peptide
NNNNLGIEGRISEFIEGRAQPAMAFHENFYDWFVRQVSGGSGGSFHENFYDWFVRQVSGAPVPYPDPLEPR

SEQ ID NO: 2167 - protein, 79 aa, Artificial Sequence; identical to SEQ ID NO: 2139
  Description of Artificial Sequence: Synthetic peptide

SEQ ID NO: 2168 - protein, 88 aa, Artificial Sequence; identical to SEQ ID NO: 2144
  Description of Artificial Sequence: Synthetic peptide

SEQ ID NO: 2169 - protein, 90 aa, Artificial Sequence; identical to SEQ ID NO: 2142
  Description of Artificial Sequence: Synthetic peptide

SEQ ID NO: 2170 - protein, 65 aa, Artificial Sequence
  Description of Artificial Sequence: Synthetic peptide
NNNNLGIEGRISEFIEGRDYKDDDDKVRVDWLQRNANFYDWFVAELVAAAGAPVPYPDPLEPRAA

SEQ ID NO: 2171 - protein, 92 aa, Artificial Sequence
  Description of Artificial Sequence: Synthetic peptide
NNNNLGIEGRISEFIEGRDYKDDDDKVRVDWLQRNANFYDWFVAELGGGSGGSGRVDWLQRNANFYDWFVAELGAAAGAPVPYPDPLEPRAA

SEQ ID NO: 2172 - protein, 98 aa, Artificial Sequence
  Description of Artificial Sequence: Synthetic peptide
NNNNLGIEGRISEFIEGRDYKDDDDKVRVDWLQRNANFYAWFVAELGGGSGGSGGSGGSGRVDWLQRNANFYDWFVAELGAAAGAPVPYPDPLEPRAA

SEQ ID NO: 2173 - protein, 62 aa, Artificial Sequence; identical to SEQ ID NO: 2145
  Description of Artificial Sequence: Synthetic peptide

SEQ ID NO: 2174 - protein, 88 aa, Artificial Sequence; identical to SEQ ID NO: 2141
  Description of Artificial Sequence: Synthetic peptide

SEQ ID NO: 2175 - protein, 94 aa, Artificial Sequence; identical to SEQ ID NO: 2138
  Description of Artificial Sequence: Synthetic peptide

SEQ ID NO: 2176 - protein, 61 aa, Artificial Sequence
  Description of Artificial Sequence: Synthetic peptide
NNNNLGIEGRISEFIEGRDYKDDDDKGSLDESFYDWFERQLGKKAAGAPVPYPDPLEPRAA

SEQ ID NO: 2177 - protein, 86 aa, Artificial Sequence
  Description of Artificial Sequence: Synthetic peptide
NNNNLGIEGRISEFIEGRDYKDDDDKGSLDESFYDWFERQLGKKGGSGGSGSLDESFYDWFERQLGKKAAAGAPVPYPDPLEPRAA

SEQ ID NO: 2178 - protein, 92 aa, Artificial Sequence
  Description of Artificial Sequence: Synthetic peptide
NNNNLGIEGRISEFIEGRDYKDDDDKGSLDESFYDWFERQLGKKGGSGGSGGSGGSGSLDESFYDWFERQLGKKAAAGAPVPYPDPLEPRAA

SEQ ID NO: 2179 - protein, 57 aa, Artificial Sequence; identical to SEQ ID NO: 2147
  Description of Artificial Sequence: Synthetic peptide

SEQ ID NO: 2180 - protein, 64 aa, Artificial Sequence; identical to SEQ ID NO: 2148
  Description of Artificial Sequence: Synthetic peptide

SEQ ID NO: 2181 - protein, 56 aa, Artificial Sequence; identical to SEQ ID NO: 2149
  Description of Artificial Sequence: Synthetic peptide

SEQ ID NO: 2182 - protein, 76 aa, Artificial Sequence
  Description of Artificial Sequence: Synthetic peptide
NNNNLGIEGRISEFIEGRDYKDDDDKFHENFYDWFVRQVSGGSGGSLDALDRLMRYFEERPSLGAPVPYPDPLEPR

SEQ ID NO: 2183 - protein, 60 aa, Artificial Sequence
  Description of Artificial Sequence: Synthetic peptide
DYKDDDKFHENFYDWFVRQVSGSGSLDALDRLMRYFEERPSLAAAGAPVPYPDPLEPRAA

SEQ ID NO: 2184 - protein, 83 aa, Artificial Sequence; identical to SEQ ID NO: 2135
  Description of Artificial Sequence: Synthetic peptide

SEQ ID NO: 2185 - protein, 65 aa, Artificial Sequence; identical to SEQ ID NO: 2151
  Description of Artificial Sequence: Synthetic peptide

SEQ ID NO: 2186 - protein, 89 aa, Artificial Sequence; identical to SEQ ID NO: 2136
  Description of Artificial Sequence: Synthetic peptide

SEQ ID NO: 2187 - protein, 71 aa, Artificial Sequence; identical to SEQ ID NO: 2153
  Description of Artificial Sequence: Synthetic peptide

SEQ ID NO: 2188 - protein, 86 aa, Artificial Sequence; identical to SEQ ID NO: 2137
  Description of Artificial Sequence: Synthetic peptide

SEQ ID NO: 2189 - protein, 74 aa, Artificial Sequence
  Description of Artificial Sequence: Synthetic peptide
DYKDDDDKVRVDWLQRNANFYDWFVAELGGGSGGSGRVDWLQRNANFYDWFVAELGAAAGAPVPYPDPLEPRSA

SEQ ID NO: 2190 - protein, 80 aa, Artificial Sequence
  Description of Artificial Sequence: Synthetic peptide
DYKDDDDKVRVDWLQRNANFYAWFVAELGGGSGGSGGSGGSGRVDWLQRNANFYDWFVAELGAAAGAPVPYPDPLEPRAA

SEQ ID NO: 2191 - protein, 46 aa, Artificial Sequence
  Description of Artificial Sequence: Synthetic peptide
DYKDDDDKHLCVLEELFWGASLFGYCSGAAAGAPVPYPDPLEPRAA

SEQ ID NO: 2192 - protein, 72 aa, Artificial Sequence
  Description of Artificial Sequence: Synthetic peptide
DYKDDDDKHLCVLEELFWGASLFGYCSGGGSGGSHLCVLEELFWGASLFGYCSGAAAGAPVPYPDPLEPRAA

SEQ ID NO: 2193 - protein, 70 aa, Artificial Sequence; identical to SEQ ID NO: 2112
  Description of Artificial Sequence: Synthetic peptide

SEQ ID NO: 2194 - protein, 76 aa, Artificial Sequence; identical to SEQ ID NO: 2113
  Description of Artificial Sequence: Synthetic peptide

SEQ ID NO: 2195 - protein, 48 aa, Artificial Sequence
  Description of Artificial Sequence: Synthetic peptide
MADYKDDDDKWLDQEWAWVQCEVYGRGCPSAAAGAPVPYPDPLEPRPG

SEQ ID NO: 2196 - protein, 72 aa, Artificial Sequence; identical to SEQ ID NO: 2116
  Description of Artificial Sequence: Synthetic peptide

SEQ ID NO: 2197 - protein, 72 aa, Artificial Sequence; identical to SEQ ID NO: 2114
  Description of Artificial Sequence: Synthetic peptide

SEQ ID NO: 2198 - protein, 78 aa, Artificial Sequence; identical to SEQ ID NO: 2115
  Description of Artificial Sequence: Synthetic peptide

SEQ ID NO: 2199 - protein, 74 aa, Artificial Sequence
  Description of Artificial Sequence: Synthetic peptide
MADYKDEIEAEWGRVRCLVYGRCVGGGGSGGSGGSGGSGSLDESFYDWFERQLGKKAAAGAPVPYPDPLEPRPG

SEQ ID NO: 2200 - protein, 81 aa, Artificial Sequence
  Description of Artificial Sequence: Synthetic peptide
MADYKDDDDKWLDQEWAWVQCEVYGRGCPSQPPPPDITTHRADPQGSLDESFYDWFERQLGKKAAAGAPVPYPDPLEPRPG

SEQ ID NO: 2201 - protein, 79 aa, Artificial Sequence
  Description of Artificial Sequence: Synthetic peptide
MADYKDDDDKWLDQEWAWVQCEVYGRGCPSTPKPPTPPPLSADGSLDESFYDWFERQLGKKAAAGAPVPYPDPLEPRPG

SEQ ID NO: 2202 - protein, 29 aa, Artificial Sequence
  Description of Artificial Sequence: Synthetic peptide
MQNDDGSLDESFYDWFERQLGHHHHHHPG

SEQ ID NO: 2203 - protein, 31 aa, Artificial Sequence
  Description of Artificial Sequence: Synthetic peptide
MGSLDESFYDWFERQLGEEEGGDHHHHHHPG

SEQ ID NO: 2204 - protein, 35 aa, Artificial Sequence
  Description of Artificial Sequence: Synthetic peptide
MQNDDGSLDESFYDWFERQLGEEEGGDHHHHHHPG

SEQ ID NO: 2205 - protein, 13 aa, Artificial Sequence
  Description of Artificial Sequence: Synthetic peptide
GAPVPYPDPLEPR

SEQ ID NO: 2206 - protein, 20 aa, Artificial Sequence
  Description of Artificial Sequence: Synthetic peptide
WLDQERAWLWCEISGRGCLS

SEQ ID NO: 2207 - protein, 43 aa, Artificial Sequence
  Description of Artificial Sequence: Synthetic peptide
LDQERAWLWCEISGRGCLSGGSGGSGSLDESFYDWFERQLGKK

SEQ ID NO: 2208 - protein, 50 aa, Artificial Sequence
  Description of Artificial Sequence: Synthetic peptide
WLDQERAWLWCEISGRGCLSGGSGGSGGSGGSGSLDESFYDWFERQLGKK

SEQ ID NO: 2209 - protein, 24 aa, Artificial Sequence
  Description of Artificial Sequence: Synthetic peptide
DYKDFYDAIDQLVRGSARAGGTRD

SEQ ID NO: 2210 - protein, 52 aa, Artificial Sequence
  Description of Artificial Sequence: Synthetic peptide
WLDQERAWLWCEISGRGCLSGGSGGSGIISQSCPESFYDWFAGQVSDPWWCW

SEQ ID NO: 2211 - protein, 44 aa, Artificial Sequence
  Description of Artificial Sequence: Synthetic peptide
WLDQERAWLWCEISGRGCLSGGSGGSGSLDESFYDWFERQLGKK

SEQ ID NO: 2212 - protein, 50 aa, Artificial Sequence; identical to SEQ ID NO: 2208
  Description of Artificial Sequence: Synthetic peptide

SEQ ID NO: 2213 - protein, 36 aa, Artificial Sequence
  Description of Artificial Sequence: Synthetic peptide
GLDQEQAWVECEVYGRGCPYGSLDESFYDWFERQLG

SEQ ID NO: 2214 - protein, 42 aa, Artificial Sequence
  Description of Artificial Sequence: Synthetic peptide
RLEEEWAWVQCEVYGRGCPSGGSGGSGSLDESFYDWFERQLG

SEQ ID NO: 2215 - protein, 42 aa, Artificial Sequence
  Description of Artificial Sequence: Synthetic peptide
SLDREWACVKCEVYGRGCPCGGSGGSGSLDESFYDWFERQLG

SEQ ID NO: 2216 - protein, 42 aa, Artificial Sequence
  Description of Artificial Sequence: Synthetic peptide
SLEEEWAQVECEVYGRGCPSGGSGGSGSLDESFYDWFERQLG

SEQ ID NO: 2217 - protein, 42 aa, Artificial Sequence; identical to SEQ ID NO: 2098
  Description of Artificial Sequence: Synthetic peptide

SEQ ID NO: 2218 - protein, 42 aa, Artificial Sequence
  Description of Artificial Sequence: Synthetic peptide
SIEEEWAQIKCDVWGRGCPPGGSGGSGLLDESFYHWFDRQLR

SEQ ID NO: 2219 - protein, 37 aa, Artificial Sequence
  Description of Artificial Sequence: Synthetic peptide
QLDLEWAWVQCEVYGRGCGGSGSLDESFYDWFERQLG

SEQ ID NO: 2220 - protein, 33 aa, Artificial Sequence
  Description of Artificial Sequence: Synthetic peptide
QLDEEWAGVQCEVYGRGCSLDESFYDWFERQLG

SEQ ID NO: 2221 - protein, 42 aa, Artificial Sequence
  Description of Artificial Sequence: Synthetic peptide
RLEEEWRWVQCEVYGRGCAAGGSGGSGSLDESFYDWFERQLG

SEQ ID NO: 2222 - protein, 41 aa, Artificial Sequence
  Description of Artificial Sequence: Synthetic peptide
SLDQEWAWVQCEVYGRGCPSGGSGGSDSDWAGYEWFEEQLD

SEQ ID NO: 2223 - protein, 16 aa, Artificial Sequence
  Description of Artificial Sequence: Synthetic peptide
  MOD_RES (6): Asp or Leu
GLADEXFYEWFERQLR

SEQ ID NO: 2224 - protein, 16 aa, Artificial Sequence
  Description of Artificial Sequence: Synthetic peptide
  MOD_RES (9): Glu or Ala
GQLDEDFYXWFDRQLS

SEQ ID NO: 2225 - protein, 16 aa, Artificial Sequence
  Description of Artificial Sequence: Synthetic peptide
  MOD_RES (3): Met or Trp
  MOD_RES (9): Glu or Ala
GFXDESFYXWFERQLR

SEQ ID NO: 2226 - protein, 20 aa, Artificial Sequence
  Description of Artificial Sequence: Synthetic peptide
  MOD_RES (14): Tyr or Trp
SLEEEWAQIECEVXGRGCPS

SEQ ID NO: 2227 - protein, 20 aa, Artificial Sequence
  Description of Artificial Sequence: Synthetic peptide
WLDQEWVQCEVYGRGCPSKK

SEQ ID NO: 2228 - protein, 11 aa, Artificial Sequence
  Description of Artificial Sequence: Synthetic peptide
  MOD_RES (2): 1-amino-1-cyclohexanecarboxylic acid
  MOD_RES (7): D-Trp
HXCAQEWGSEL

SEQ ID NO: 2229 - protein, 17 aa, Artificial Sequence
  Description of Artificial Sequence: Synthetic peptide
  MOD_RES (1): tetrahydroisoquinoline-3-carboxylic acid
XQCSGSESFYDWFERQL

SEQ ID NO: 2230 - protein, 31 aa, Artificial Sequence
  Description of Artificial Sequence: Synthetic peptide
SLEEEWAQVECEVYGRGCPSESFYDWFERQL

SEQ ID NO: 2231 - protein, 29 aa, Artificial Sequence
  Description of Artificial Sequence: Synthetic peptide
SLEEEWAQVECEVYGRGCPSFYDWFERQL

SEQ ID NO: 2232 - protein, 35 aa, Artificial Sequence
  Description of Artificial Sequence: Synthetic peptide
SLEEEWAWVECEVYGRGCPSGSLDESFYDWFERQL

SEQ ID NO: 2233 - protein, 30 aa, Artificial Sequence
  Description of Artificial Sequence: Synthetic peptide
LDQEWAQVQCEVYGRGCPSESFYDWFERQL

SEQ ID NO: 2234 - protein, 31 aa, Artificial Sequence
  Description of Artificial Sequence: Synthetic peptide
SLEEEWAWVQCEVYGRGCPSESFYDWFERQL

SEQ ID NO: 2235 - protein, 33 aa, Artificial Sequence; identical to SEQ ID NO: 2220
  Description of Artificial Sequence: Synthetic peptide

SEQ ID NO: 2236 - protein, 30 aa, Artificial Sequence
  Description of Artificial Sequence: Synthetic peptide
LEEEWAQVECEVYGRGCPSESFYDWFERQL

SEQ ID NO: 2237 - protein, 36 aa, Artificial Sequence
  Description of Artificial Sequence: Synthetic peptide
SLEHEWAQVECEVYGRGCPSGSLDESFYDWFERQLG

SEQ ID NO: 2238 - protein, 36 aa, Artificial Sequence
  Description of Artificial Sequence: Synthetic peptide
SLEQEWAQVECEVYGRGCPSGSLDESFYDWFERQLG

SEQ ID NO: 2239 - protein, 36 aa, Artificial Sequence
  Description of Artificial Sequence: Synthetic peptide
SLELEWAQVECEVYGRGCPSGSLDESFYDWFERQLG

SEQ ID NO: 2240 - protein, 36 aa, Artificial Sequence
  Description of Artificial Sequence: Synthetic peptide
SLEEEWAQVKCEVYGRGCPSGSLDESFYDWFERQLG

SEQ ID NO: 2241 - protein, 36 aa, Artificial Sequence
  Description of Artificial Sequence: Synthetic peptide
SLEEEWAQVECEVWGRGCPSGSLDESFYDWFERQLG

SEQ ID NO: 2242 - protein, 36 aa, Artificial Sequence
  Description of Artificial Sequence: Synthetic peptide
SLEEEWAQVECEVYGRGCPSGSLDESFYHWFERQLG

SEQ ID NO: 2243 - protein, 42 aa, Artificial Sequence
  Description of Artificial Sequence: Synthetic peptide
GSLDESFYDWFERQLGGGSGGSWLDEEWAQVQCEVYGRGCPS

SEQ ID NO: 2244 - protein, 32 aa, Artificial Sequence
  Description of Artificial Sequence: Synthetic peptide
ESFYDWFERQLGWLDQEWAWVQCEVYGRGCPS

SEQ ID NO: 2245 - protein, 32 aa, Artificial Sequence
  Description of Artificial Sequence: Synthetic peptide
ESFYDWFERQLGWLDEEWAQVQCEVYGRGCPS

SEQ ID NO: 2246 - protein, 13 aa, Artificial Sequence
  Description of Artificial Sequence: Synthetic peptide
SLEEEWAQVECEV

SEQ ID NO: 2247 - protein, 24 aa, Artificial Sequence
  Description of Artificial Sequence: Synthetic peptide
  MOD_RES (1): Bpa
  MOD_RES (22): Bpa
XGRGCPSGSLDESFYDWFERQXGK

SEQ ID NO: 2248 - protein, 20 aa, Artificial Sequence
  Description of Artificial Sequence: Synthetic peptide
SLEEEWAQVECEVYGRGCPS

SEQ ID NO: 2249 - protein, 20 aa, Artificial Sequence
  Description of Artificial Sequence: Synthetic peptide
SLEEEWAQVECEVWGRGCPS

SEQ ID NO: 2250 - protein, 35 aa, Artificial Sequence
  Description of Artificial Sequence: Synthetic peptide
SLEEEWAQVECEVYGRGCSGSLDESFYDWFERQLG

SEQ ID NO: 2251 - protein, 18 aa, Artificial Sequence
  Description of Artificial Sequence: Synthetic peptide
  MOD_RES (1): acetyl-Gly
  MOD_RES (17): POX
GSLDESFYDWFERQLGXK

SEQ ID NO: 2252 - protein, 36 aa, Artificial Sequence
  Description of Artificial Sequence: Synthetic peptide
SLEEEWAQVEAEVYGRGAPSGSLDESFYDWFERQLG

SEQ ID NO: 2253 - protein, 43 aa, Artificial Sequence
  Description of Artificial Sequence: Synthetic peptide
SLEEEWAQVECEVYGRGCPSGSLDESFYDWFERQLGKHHHHHH

SEQ ID NO: 2254 - protein, 36 aa, Artificial Sequence
  Description of Artificial Sequence: Synthetic peptide
SLEEEWAQVECEVYGRGCPPGLLDESFYHWFDRQLR

SEQ ID NO: 2255 - protein, 32 aa, Artificial Sequence
  Description of Artificial Sequence: Synthetic peptide
SLEEEWAQIECEVYGRGCPSESFYDWFERQLG

SEQ ID NO: 2256 - protein, 32 aa, Artificial Sequence
  Description of Artificial Sequence: Synthetic peptide
SLEEEWAQVECEVYGRGCPSESFYDWFVRQLG

SEQ ID NO: 2257 - protein, 30 aa, Artificial Sequence
  Description of Artificial Sequence: Synthetic peptide
SIEEEWAQIKCDVWGRGCSESFYDWFERQL

SEQ ID NO: 2258 - protein, 31 aa, Artificial Sequence
  Description of Artificial Sequence: Synthetic peptide
SLEEEWAQIECEVYGRGCPSESFYDWFERQL

SEQ ID NO: 2259 - protein, 31 aa, Artificial Sequence
  Description of Artificial Sequence: Synthetic peptide
SLEEEWAQIECEVWGRGCPSESFYDWFERQL

SEQ ID NO: 2260 - protein, 30 aa, Artificial Sequence
  Description of Artificial Sequence: Synthetic peptide
SLEEEWAQIECEVWGRGCSESFYDWFERQL

SEQ ID NO: 2261 - protein, 35 aa, Artificial Sequence
  Description of Artificial Sequence: Synthetic peptide
SLEEEWAQIECEVWGRGCPSGSLDESFYDWFERQL

SEQ ID NO: 2262 - protein, 34 aa, Artificial Sequence
  Description of Artificial Sequence: Synthetic peptide
SLEEEWAQIECEVWGRGCSGSLDESFYDWFERQL

SEQ ID NO: 2263 - protein, 29 aa, Artificial Sequence
  Description of Artificial Sequence: Synthetic peptide
SIEEEWAQIKCDVWGRCSESFYDWFERQL

SEQ ID NO: 2264 - protein, 15 aa, Artificial Sequence
  Description of Artificial Sequence: Synthetic peptide
SLEEEWAQIQCEVWG

SEQ ID NO: 2265 - protein, 15 aa, Artificial Sequence
  Description of Artificial Sequence: Synthetic peptide
  MOD_RES (2): D-Asn
  MOD_RES (3): D-Cys
RNCSESFYDWFERQL

SEQ ID NO: 2266 - protein, 29 aa, Artificial Sequence
  Description of Artificial Sequence: Synthetic peptide
SLEEEWAQIQCEVWGRCSESFYDWFERQL

SEQ ID NO: 2267 - protein, 15 aa, Artificial Sequence
  Description of Artificial Sequence: Synthetic peptide
SIEEEWAQIQCEVWG

SEQ ID NO: 2268 - protein, 15 aa, Artificial Sequence
  Description of Artificial Sequence: Synthetic peptide
  MOD_RES (2): D-Pro
  MOD_RES (3): D-Cys
RPCSESFYDWFERQL

SEQ ID NO: 2269 - protein, 32 aa, Artificial Sequence
  Description of Artificial Sequence: Synthetic peptide
SIEEEWAQVECEVWGRGCPSESFYDWFERQLG

SEQ ID NO: 2270 - protein, 31 aa, Artificial Sequence
  Description of Artificial Sequence: Synthetic peptide
SIEEEWAQIECDVWGRGPSESFYDWFERQLG

SEQ ID NO: 2271 - protein, 31 aa, Artificial Sequence
  Description of Artificial Sequence: Synthetic peptide
  MOD_RES (1): acetyl-Ser
SIEEEWAQIKCDVWGRGPSESFYDWFERQLG

SEQ ID NO: 2272 - protein, 30 aa, Artificial Sequence
  Description of Artificial Sequence: Synthetic peptide
SLEEEWAQIEEVWGRGPSESFYDWFERQLG

SEQ ID NO: 2273 - protein, 29 aa, Artificial Sequence
  Description of Artificial Sequence: Synthetic peptide
SLEEEWAQIEEVWGRPSESFYDWFERQLG

SEQ ID NO: 2274 - protein, 29 aa, Artificial Sequence
  Description of Artificial Sequence: Synthetic peptide
SLEEEWAQIEEVWGRGSESFYDWFERQLG

SEQ ID NO: 2275 - protein, 28 aa, Artificial Sequence
  Description of Artificial Sequence: Synthetic peptide
SLEEEWAQIEEVWGRSESFYDWFERQLG

SEQ ID NO: 2276 - protein, 29 aa, Artificial Sequence
  Description of Artificial Sequence: Synthetic peptide
SLEEEWAQIESEVWGRSESFYDWFERQLG

SEQ ID NO: 2277 - protein, 32 aa, Artificial Sequence
  Description of Artificial Sequence: Synthetic peptide
SLEEEWAQIEAEVWGRGAPSESFYDWFERQLG

SEQ ID NO: 2278 - protein, 31 aa, Artificial Sequence
  Description of Artificial Sequence: Synthetic peptide
SLEEEWAQIEAEVWGRAPSESFYDWFERQLG

SEQ ID NO: 2279 - protein, 31 aa, Artificial Sequence
  Description of Artificial Sequence: Synthetic peptide
SLEEEWAQIEAEVWGRGASESFYDWFERQLG

SEQ ID NO: 2280 - protein, 29 aa, Artificial Sequence
  Description of Artificial Sequence: Synthetic peptide
SLEEEWAQIEAEVWGRSESFYDWFERQLG

SEQ ID NO: 2281 - protein, 31 aa, Artificial Sequence
  Description of Artificial Sequence: Synthetic peptide
SLEEEWAQIECEVYGRGCSESFYDWFERQLG

SEQ ID NO: 2282 - protein, 31 aa, Artificial Sequence; identical to SEQ ID NO: 2281
  Description of Artificial Sequence: Synthetic peptide

SEQ ID NO: 2283 - protein, 18 aa, Artificial Sequence
  Description of Artificial Sequence: Synthetic peptide
SLEEEWAQVECEVYGRGC

SEQ ID NO: 2284 - protein, 12 aa, Artificial Sequence
  Description of Artificial Sequence: Synthetic peptide
  MOD_RES (1): Beta turn-Glu
ESFYDWFERQLG

SEQ ID NO: 2285 - protein, 16 aa, Artificial Sequence
  Description of Artificial Sequence: Synthetic peptide
SLEEEWAQIESEVWGR

SEQ ID NO: 2286 - protein, 12 aa, Artificial Sequence
  Description of Artificial Sequence: Synthetic peptide
  MOD_RES (1): Beta turn-Glu
ESFYDWFERQLG

SEQ ID NO: 2287 - protein, 30 aa, Artificial Sequence
  Description of Artificial Sequence: Synthetic peptide
SLEEEWAQIECEVWGRGCPKGFYGWFRRRG

SEQ ID NO: 2288 - protein, 31 aa, Artificial Sequence
  Description of Artificial Sequence: Synthetic peptide
ELEEEWAQIECEVWGRGCPKGFYGWFRRRGK

SEQ ID NO: 2289 - protein, 31 aa, Artificial Sequence
  Description of Artificial Sequence: Synthetic peptide
SLEEEWAQIECEVWGRGCPKGFYGWFRRRRG

SEQ ID NO: 2290 - protein, 30 aa, Artificial Sequence
  Description of Artificial Sequence: Synthetic peptide
SLEREWAQIECEVWGRGCSESFYDWFERQL

SEQ ID NO: 2291 - protein, 31 aa, Artificial Sequence; identical to SEQ ID NO: 2259
  Description of Artificial Sequence: Synthetic peptide

SEQ ID NO: 2292 - protein, 32 aa, Artificial Sequence
  Description of Artificial Sequence: Synthetic peptide
ELEEEWAQIECEVWGRGCPKGFYGWFRRRRGK

SEQ ID NO: 2293 - protein, 12 aa, Artificial Sequence
  Description of Artificial Sequence: Synthetic peptide
LEEEWAQVECEV

SEQ ID NO: 2294 - protein, 22 aa, Artificial Sequence
  Description of Artificial Sequence: Synthetic peptide
  MOD_RES (1): Iodo-Tyr
YGRGCSGSLDESFYDWFERQLG

SEQ ID NO: 2295 - protein, 22 aa, Artificial Sequence
  Description of Artificial Sequence: Synthetic peptide
  MOD_RES (1): Iodo-Tyr
YGRGCSGSLDESFYDWFERQLG

SEQ ID NO: 2296 - protein, 26 aa, Artificial Sequence
  Description of Artificial Sequence: Synthetic peptide
LEEEWAQVECEVYGRGCSGSLDESFY

SEQ ID NO: 2297 - protein, 9 aa, Artificial Sequence
  Description of Artificial Sequence: Synthetic peptide
  MOD_RES (1): Iodo-Tyr
YDWFERQLG

SEQ ID NO: 2298 - protein, 12 aa, Artificial Sequence
  Description of Artificial Sequence: Synthetic peptide
LEEEWAQIECEV

SEQ ID NO: 2299 - protein, 22 aa, Artificial Sequence
  Description of Artificial Sequence: Synthetic peptide
  MOD_RES (1): Iodo-Tyr
YGRGCSGSLDESFYDWFERQLG

SEQ ID NO: 2300 - protein, 25 aa, Artificial Sequence
  Description of Artificial Sequence: Synthetic peptide
LEEEWAQIECEVWGRGCSGSLDESF

SEQ ID NO: 2301 - protein, 9 aa, Artificial Sequence
  Description of Artificial Sequence: Synthetic peptide
  MOD_RES (1): Iodo-Tyr
YDWFERQLG

SEQ ID NO: 2302 - protein, 21 aa, Artificial Sequence
  Description of Artificial Sequence: Synthetic peptide
SLEEEWAQIECEVWGRGCPSY

SEQ ID NO: 2303 - protein, 21 aa, Artificial Sequence
  Description of Artificial Sequence: Synthetic peptide
SIEEEWAQIKCDVWGRGCPSY

SEQ ID NO: 2304 - protein, 30 aa, Artificial Sequence
  Description of Artificial Sequence: Synthetic peptide
SLEEEWAQIECEVWGRCWHHSFYDWFERQL

SEQ ID NO: 2305 - protein, 29 aa, Artificial Sequence
  Description of Artificial Sequence: Synthetic peptide
LEEEWAQIQREVWHSPASESFYDWFERQL

SEQ ID NO: 2306 - protein, 30 aa, Artificial Sequence
  Description of Artificial Sequence: Synthetic peptide
SLEEEWAQIQHELYGPAESESFYDWFERQL

SEQ ID NO: 2307 - protein, 31 aa, Artificial Sequence; identical to SEQ ID NO: 2258
  Description of Artificial Sequence: Synthetic peptide
  MOD_RES (1): acetyl-Ser

SEQ ID NO: 2308 - protein, 29 aa, Artificial Sequence
  Description of Artificial Sequence: Synthetic peptide
  MOD_RES (1): acetyl-Ser
SIEEEWAQIKCDVWGRGSESFYDWFERQL

SEQ ID NO: 2309 - protein, 30 aa, Artificial Sequence
  Description of Artificial Sequence: Synthetic peptide
SLEEEWAQIQEDLYGANHNESFYDWFERQL

SEQ ID NO: 2310 - protein, 30 aa, Artificial Sequence
  Description of Artificial Sequence: Synthetic peptide
SLEEEWAQIQAEVYGNPNSESFYDWFERQL

SEQ ID NO: 2311 - protein, 30 aa, Artificial Sequence; identical to SEQ ID NO: 2309
  Description of Artificial Sequence: Synthetic peptide
  MOD_RES (1): acetyl-Ser

SEQ ID NO: 2312 - protein, 31 aa, Artificial Sequence
  Description of Artificial Sequence: Synthetic peptide
SLEEEWAQIQCEVWGRGCWRRHFYDWFERQL

SEQ ID NO: 2313 - protein, 30 aa, Artificial Sequence
  Description of Artificial Sequence: Synthetic peptide
SLEEEWAQIQHELWPVEKGESFYDWFERQL

SEQ ID NO: 2314 - protein, 31 aa, Artificial Sequence
  Description of Artificial Sequence: Synthetic peptide
SLEEEWAQIQCEVWGRGCPSESFYDWFERQL

SEQ ID NO: 2315 - protein, 30 aa, Artificial Sequence
  Description of Artificial Sequence: Synthetic peptide
SLEEEWAQIQCKLYGRNCKESFYDWFERQL

SEQ ID NO: 2316 - protein, 29 aa, Artificial Sequence
  Description of Artificial Sequence: Synthetic peptide
SLEEEWAQIQCKVWGKCKESFYDWFERQL

SEQ ID NO: 2317 - protein, 31 aa, Artificial Sequence
  Description of Artificial Sequence: Synthetic peptide
SLEEEWAQIQCKLYGRNCKSESFYDWFERQL

SEQ ID NO: 2318 - protein, 30 aa, Artificial Sequence
  Description of Artificial Sequence: Synthetic peptide
SLEEEWAQIQCKLWGKNCKESFYDWFERQL

SEQ ID NO: 2319 - protein, 33 aa, Artificial Sequence
  Description of Artificial Sequence: Synthetic peptide
SLEEEWAQIECEVWGRGCPSESFYDWFERQLPK

SEQ ID NO: 2320 - protein, 32 aa, Artificial Sequence
  Description of Artificial Sequence: Synthetic peptide
HQLEEEWQAIQCELWGRGCPSESFYDWFERQL

SEQ ID NO: 2321 - protein, 31 aa, Artificial Sequence
  Description of Artificial Sequence: Synthetic peptide
HLEEEWSEIQCELWGRGCPSESFYDWFERQL

SEQ ID NO: 2322 - protein, 33 aa, Artificial Sequence
  Description of Artificial Sequence: Synthetic peptide
SLEEEWAQIECEVYGRGCPSEDFYDWFEAQLHA

SEQ ID NO: 2323 - protein, 33 aa, Artificial Sequence; identical to SEQ ID NO: 2322
  Description of Artificial Sequence: Synthetic peptide
  MOD_RES (1): acetyl-Ser

SEQ ID NO: 2324 - protein, 34 aa, Artificial Sequence
  Description of Artificial Sequence: Synthetic peptide
HQLEEEWQAIQCELWGRGCPSEDFYDWFEAQLHA

SEQ ID NO: 2325 - protein, 33 aa, Artificial Sequence
  Description of Artificial Sequence: Synthetic peptide
HLEEEWSEIQCELWGRGCPSEDFYDWFEAQLHA

SEQ ID NO: 2326 - protein, 34 aa, Artificial Sequence
  Description of Artificial Sequence: Synthetic peptide
HELEEEWKRIECELWGRGCPSEDFYDWFEAQLHA

SEQ ID NO: 2327 - protein, 34 aa, Artificial Sequence; identical to SEQ ID NO: 2324
  Description of Artificial Sequence: Synthetic peptide
  MOD_RES (1): acetyl-His

SEQ ID NO: 2328 - protein, 33 aa, Artificial Sequence; identical to SEQ ID NO: 2325
  Description of Artificial Sequence: Synthetic peptide
  MOD_RES (1): acetyl-His

SEQ ID NO: 2329 - protein, 34 aa, Artificial Sequence; identical to SEQ ID NO: 2326
  Description of Artificial Sequence: Synthetic peptide
  MOD_RES (1): acetyl-His

SEQ ID NO: 2330 - protein, 32 aa, Artificial Sequence
  Description of Artificial Sequence: Synthetic peptide
SLEEEWAQIECEVWGRGCPSESFYDWFERQLG

SEQ ID NO: 2331 - protein, 32 aa, Artificial Sequence; identical to SEQ ID NO: 2330
  Description of Artificial Sequence: Synthetic peptide
  MOD_RES (1): acetyl-Ser

SEQ ID NO: 2332 - protein, 13 aa, Artificial Sequence
  Description of Artificial Sequence: Synthetic peptide
SLEEEWAQVECEV

SEQ ID NO: 2333 - protein, 23 aa, Artificial Sequence
  Description of Artificial Sequence: Synthetic peptide
  c-term amidated
  MOD_RES (1): 3-iodo-Tyr
YGRGCPSGSLDESFYDWFERQLG

SEQ ID NO: 2334 - protein, 23 aa, Artificial Sequence
  Description of Artificial Sequence: Synthetic peptide
KVRGFQGGTVWPGYEWLRNAAKK

SEQ ID NO: 2335 - protein, 40 aa, Artificial Sequence
  Description of Artificial Sequence: Synthetic peptide
SLEEEWAQIECEVYGRGCPSVRGFQGGTVWPGYEWLRNAA

SEQ ID NO: 2336 - protein, 30 aa, Artificial Sequence; identical to SEQ ID NO: 2313
  Description of Artificial Sequence: Synthetic peptide
  MOD_RES (1): acetyl-Ser

SEQ ID NO: 2337 - protein, 33 aa, Artificial Sequence
  Description of Artificial Sequence: Synthetic peptide
  MOD_RES (1): acetyl-His
HGLEEEWAQIQHELWPVEKGESFYDWFEAQLHA

SEQ ID NO: 2338 - protein, 31 aa, Artificial Sequence
  Description of Artificial Sequence: Synthetic peptide
HLEEEWRQIQCELWGRGCPSESFYDWFERQL

SEQ ID NO: 2339 - protein, 33 aa, Artificial Sequence
  Description of Artificial Sequence: Synthetic peptide
  MOD_RES (1): acetyl-His
HLEEEWRQIQCELWGRGCPSESFYDWFEAQLHA

SEQ ID NO: 2340 - protein, 32 aa, Artificial Sequence
  Description of Artificial Sequence: Synthetic peptide
HPLEEEWSQIQCELWGRGCPSESFYDWFERQL

SEQ ID NO: 2341 - protein, 34 aa, Artificial Sequence
  Description of Artificial Sequence: Synthetic peptide
  MOD_RES (1): acetyl-His
HPLEEEWSQIQCELWGRGCPSESFYDWFEAQLHA

SEQ ID NO: 2342 - protein, 34 aa, Artificial Sequence
  Description of Artificial Sequence: Synthetic peptide
HGLEEEWAQIQCEVWGRGCPSESFYDWFEAQLHA

SEQ ID NO: 2343 - protein, 33 aa, Artificial Sequence
  Description of Artificial Sequence: Synthetic peptide
  MOD_RES (1): acetyl-Ser
SLEEEWAQIQCEVWGRGCPSESFYDWFEAQLHA

SEQ ID NO: 2344 - protein, 33 aa, Artificial Sequence
  Description of Artificial Sequence: Synthetic peptide
  MOD_RES (1): acetyl-Ser
SLEEEWAQIECEVYGRGCPSEDFYDWFEEQLHN

SEQ ID NO: 2345 - protein, 31 aa, Artificial Sequence; identical to SEQ ID NO: 2314
  Description of Artificial Sequence: Synthetic peptide
  MOD_RES (1): acetyl-Ser

SEQ ID NO: 2346 - protein, 31 aa, Artificial Sequence
  Description of Artificial Sequence: Synthetic peptide
  MOD_RES (1): acetyl-Ser
SLEEEWAQIECEVYGRGCPSDGFYNAIELLS

SEQ ID NO: 2347 - protein, 35 aa, Artificial Sequence
  Description of Artificial Sequence: Synthetic peptide
  MOD_RES (1): acetyl-His
HGLEEEWAQIQCEVWGRGCQRPEPFYDWFEAQLHA

SEQ ID NO: 2348 - protein, 34 aa, Artificial Sequence; identical to SEQ ID NO: 2342
  Description of Artificial Sequence: Synthetic peptide
  MOD_RES (1): acetyl-His

SEQ ID NO: 2349 - protein, 22 aa, Artificial Sequence
  Description of Artificial Sequence: Synthetic peptide
SLEEEWAQIQHELWPVEAGESY

SEQ ID NO: 2350 - protein, 33 aa, Artificial Sequence
  Description of Artificial Sequence: Synthetic peptide
  MOD_RES (1): acetyl-Ser
SLEEEWAQIQAEVWGRGAPSESFYDWFEAQLHA

SEQ ID NO: 2351 - protein, 32 aa, Artificial Sequence
  Description of Artificial Sequence: Synthetic peptide
  MOD_RES (1): acetyl-Ser
SLEEEWAQIQCEVWGRGCQRPEPFYDWFERQL

SEQ ID NO: 2352 - protein, 31 aa, Artificial Sequence
  Description of Artificial Sequence: Synthetic peptide
  MOD_RES (1): acetyl-Ser
SLEEEWAQIQCELWGRGCPSESFYDWFERQL

SEQ ID NO: 2353 - protein, 29 aa, Artificial Sequence
  Description of Artificial Sequence: Synthetic peptide
SLEEEWAQHEEDVYHPPAESFYDWFERQL

SEQ ID NO: 2354 - protein, 32 aa, Artificial Sequence
  Description of Artificial Sequence: Synthetic peptide
  MOD_RES (1): acetyl-His
HGLEEEWAQHEEDVYHPPAESFYDWFEAQLHA

SEQ ID NO: 2355 - protein, 32 aa, Artificial Sequence
  Description of Artificial Sequence: Synthetic peptide
  MOD_RES (1): acetyl-Ser
SLEEEWAQIQCEVWGRGCHNHLPFYDWFERQL

SEQ ID NO: 2356 - protein, 33 aa, Artificial Sequence
  Description of Artificial Sequence: Synthetic peptide
  MOD_RES (1): acetyl-Ser
SLEEEWAQIQCEVWGRGCPSEPFYDWFAHDNGD

SEQ ID NO: 2357 - protein, 33 aa, Artificial Sequence
  Description of Artificial Sequence: Synthetic peptide
  MOD_RES (1): acetyl-Ser
SLEEEWAQIQCEVWGRGCPSEAFYDWFAEQLDD
